(19) United States
(12) Patent Application Publication
(10) Pub. No.: US 2008/0070268 A1
(43) Pub. Date: Mar. 20, 2008

(54) Differential expression profiling analysis of cell culture phenotypes and the uses thereof

(75) Inventors: Karin Anderson, Georgetown, MA (US); Niall Barron, Shankill (IE); Timothy Charlebois, Andover, MA (US); Martin Clynes, Clontarf (IE); Dana L. Di Nino, North Andover, MA (US); Padraig Doolan, Swords (IE); Patrick Gammell, Naas (IE); Kathleen Kopycinski, Somerville, MA (US); Mark Leonard, Manchester, NH (US); Kevin M. McCarthy, North Andover, MA (US); Paula Meleady, Ratoath (IE); Mark Melville, Melrose, MA (US); Martin S. Sinacore, Andover, MA (US)

Correspondence Address: Kirkpatrick & Lockhart Preston Gates Ellis LLP;(FORMERLY KIRKPATRICK & LOCKHART NICHOLSON GRAHAM), STATE STREET FINANCIAL CENTER, One Lincoln Street, BOSTON, MA, 02111-2950, US

(73) Assignees: Wyeth, Madison, NJ (US); Dublin City University, Dublin (IE)

(21) Appl. No.: 11/788,872

(22) Filed: Apr. 21, 2007

Related U.S. Application Data
(60) Provisional application No. 60/897,412, filed on Jan. 25, 2007.
(60) Provisional application No. 60/794,299, filed on Apr. 21, 2006.

(51) Int. Cl. C07H 21/04; C07K 16/00; C12N 5/04; C12Q 1/20

(52) U.S. Cl. 435/29; 435/325; 435/375; 530/350; 536/22.1

(57) ABSTRACT

The present invention provides methods for systematically identifying genes and proteins and related pathways that maximize protein expression and secretion by expression profiling analysis. The present invention further provides methods for manipulating the identified genes and proteins to engineer improved cell lines.

### CROSS-REFERENCE TO RELATED APPLICATIONS

[0001] This application claims priority to and the benefit of U.S. Provisional Patent Application No. 60/794,299, filed on Apr. 21, 2006, and U.S. Provisional Patent Application No. 60/897,412, filed on Jan. 25, 2007, the entire contents of both of which are incorporated by reference herein.

### REFERENCE TO SEQUENCE LISTING

[0002] This application includes as part of the originally filed subject matter two compact discs, labeled “Copy 1” and “Copy 2,” each disc containing a Sequence Listing. The machine format of each compact disc is IBM-PC and the operating system of each compact disc is MS-Windows. Each of the compact discs includes a single text file, which is named “WYE-060.ST25.txt” (1,423 KB, created Apr. 20, 2007). The contents of the compact discs labeled “Copy 1” and “Copy 2” are hereby incorporated by reference herein in their entireties.

### FIELD OF THE INVENTION

[0003] The present invention relates to methods for identifying genes and proteins that are involved in conferring a particular cell phenotype by differential expression profiling analysis and the use of the genes and proteins in the optimization of cell line culture conditions and transgene expression.

### BACKGROUND OF THE INVENTION

[0004] Fundamental to the present-day study of biology is the ability to optimally culture and maintain cell lines. Cell lines not only provide an in vitro model for the study of biological systems and diseases, but are also used to produce organic reagents. Of particular importance is the use of genetically engineered prokaryotic or eukaryotic cell lines to generate mass quantities of recombinant proteins. A recombinant protein may be used in a biological study, or as a therapeutic compound for treating a particular ailment or disease.

[0005] The production of recombinant proteins for biopharmaceutical application typically requires vast numbers of cells and/or particular cell culture conditions that influence cell growth and/or expression. In some cases, production of recombinant proteins benefits from the introduction of chemical inducing agents (such as sodium butyrate or valeric acid) to the cell culture medium. Identifying the genes and related genetic pathways that respond to the culture conditions (or particular agents) that increase transgene expression may elucidate potential targets that can be manipulated to increase recombinant protein production and/or influence cell growth.

[0006] Research into optimizing recombinant protein production has been primarily devoted to examining gene regulation, cellular responses, cellular metabolism, and pathways activated in response to unfolded proteins. Currently, there is no available method that allows for the simultaneous monitoring of transgene expression and identification of the genetic pathways involved in transgene expression. For example, currently available methods for detecting transgene expression include those that measure only the presence and amount of known proteins (e.g., Western blot analysis, enzyme-linked immunosorbent assay, and fluorescence-activated cell sorting), or the presence and amount of known messenger RNA (mRNA) transcripts (e.g., Northern blot analysis and reverse transcription-polymerase chain reaction). These and similar methods are not only limited in the number of known proteins and/or mRNA transcripts that can be detected at one time, but they also require that the investigator know or “guess” what genes are involved in transgene expression prior to experimentation (so that the appropriate antibodies or oligonucleotide probes are used). Another limitation inherent in blot analyses and similar protocols is that proteins or mRNA that are the same size cannot be distinguished. Considering the vast number of genes contained within a single genome, identification of even a minority of genes involved in a genetic pathway using the methods described above is costly and time-consuming. Additionally, the requirement that the investigator have some idea regarding which genes are involved does not allow for the identification of genes and related pathways that were either previously undiscovered or unknown to be involved in the regulation of transgene expression.

[0007] Therefore, there is a need in the field of cell line engineering for a more systematic approach to identify genes and proteins (including previously undiscovered genes and proteins) and related genetic pathways that are involved (directly or indirectly) with a particular cell culture phenotype, e.g., increased and efficient transgene expression. Discovery of these genes and/or related pathways will provide new targets that can be manipulated to improve the yield and quality of recombinant proteins and influence cell growth.

### SUMMARY OF THE INVENTION

[0008] The present invention solves these problems by providing differential expression profiling analysis of industrially relevant cell line phenotypes through the use of nucleic acid microarray and proteomics analysis methods. In particular, the present invention provides methods for systematically identifying genes and proteins and related pathways that maximize protein expression and secretion by expression profiling analysis. The present invention further provides methods for manipulating the identified genes and proteins to engineer improved cell lines.

[0009] Thus, in one aspect, the present invention features a method for identifying proteins regulating or indicative of a cell culture phenotype in a cell line. The method includes generating a protein expression profile of a sample derived from a test cell line; comparing the protein expression profile to a control profile derived from a control cell line; and identifying one or more differentially expressed proteins based on the comparison, wherein the test cell line has a cell culture phenotype distinct from that of the control cell line, and the one or more differentially expressed proteins are capable of regulating or indicating the cell culture phenotype. In a preferred embodiment, the cell line is a Chinese hamster ovary (CHO) cell line. In another embodiment, the protein expression profile is generated by fluorescent two-dimensional differential in-gel electrophoresis.

[0010] In some embodiments, the cell culture phenotype is a cell growth rate, a cellular productivity (such as a maximum cellular productivity or a sustained high cellular productivity), a peak cell density, a sustained cell viability, a rate of ammonia production or consumption, or a rate of lactate production or consumption. In one embodiment, the cell culture phenotype is a maximum cellular productivity. In another embodiment, the cell culture phenotype is a sustained cell viability. In yet another embodiment, the cell culture phenotype is a peak cell density. In still another embodiment, the cell culture phenotype is a cell growth rate.

[0011] The present invention provides a method for improving a cell line by modulating, i.e., up-regulating or down-regulating, one or more proteins identified according to the method described above. As used herein, “up-regulating” includes providing an exogenous nucleic acid (e.g., an over-expression construct) encoding a protein of interest or a variant retaining its activity (such as, for example, a mammalian homolog thereof, such as a primate or rodent homolog) or providing a factor or a molecule indirectly enhancing the protein or gene activity or expression level. As used herein, “down-regulating” includes knocking-out the gene encoding a protein of interest, providing an RNA interference construct, or providing an inhibitor or other factors indirectly inhibiting the protein or gene activity or expression level. In one particular embodiment, the present invention provides a method for improving a cell line by down-regulating one or more proteins identified according to the method described above by RNA interference.

[0012] In particular, the present invention provides a method for improving cellular productivity of a cell line including modulating, i.e., up-regulating or down-regulating, one or more proteins identified according to the method described above. In one embodiment, the present invention provides a method for improving cellular productivity of a cell line including modulating, i.e., up-regulating or down-regulating, one or more genes or proteins selected from Tables 2, 3, 9, 10, 11, and 12.

[0013] In one embodiment, the present invention provides a method for improving the cell growth rate of a cell line including modulating, i.e., up-regulating or down-regulating, one or more proteins identified according to the method described above. In particular, the present invention provides a method for improving the cell growth rate of a cell line including modulating, i.e., up-regulating or down-regulating, one or more genes or proteins selected from Tables 4, 5, 6, 13, 14, 27 and 28.

[0014] In another embodiment, the present invention provides a method for increasing the peak cell density of a cell line including modulating, i.e., up-regulating or down-regulating, one or more proteins identified according to the method described above. In particular, the present invention provides a method for increasing the peak cell density of a cell line including modulating, i.e., up-regulating or down-regulating, one or more genes or proteins selected from Tables 8, 15, 16, and 17.

[0015] In another embodiment, the present invention provides a method for increasing the sustained cell viability of a cell line including modulating, i.e., up-regulating or down-regulating, one or more proteins identified according to the method described above. In particular, the present invention provides a method for increasing the sustained cell viability of a cell line including modulating, i.e., up-regulating or down-regulating, one or more genes or proteins selected from Tables 7, 18 and 19.

[0016] In another embodiment, the present invention provides a method for regulating the lactate production or consumption of a cell line including modulating, i.e., up-regulating or down-regulating, one or more proteins identified according to the method described above. In particular, the present invention provides a method for regulating the lactate production or consumption of a cell line including modulating, i.e., up-regulating or down-regulating, one or more genes or proteins selected from Tables 7, 18 and 19.

[0017] In yet another embodiment, the present invention provides a method for improving a cell line by modulating, i.e., up-regulating or down-regulating, one or more genes or proteins identified according to the method described above. In particular, the present invention provides a method for improving a cell line by modulating, i.e., up-regulating or down-regulating, one or more genes or proteins selected from Tables 20, 24, 25 and 26.

[0018] In another aspect, the present invention provides a method for improving a cell line by modulating, i.e., up-regulating or down-regulating, at least two genes or proteins, wherein a first gene or protein affects a first cell culture phenotype and a second gene or protein affects a second, different cell culture phenotype, wherein the cell culture phenotypes are selected from the group consisting of a cell growth rate, a cellular productivity, a peak cell density, a sustained cell viability, a rate of ammonia production or consumption, or a rate of lactate production or consumption. In one embodiment, the method further including up-regulating or down-regulating a third gene or protein affecting a third cell culture phenotype different from the first and second cell culture phenotypes.

[0019] In yet another aspect, the present invention provides a method of assessing a cell culture phenotype of a cell line. The method including detecting, in a sample from the cell culture, an expression level of a protein identified according to any of the methods described above; and comparing the expression level to a reference level, wherein the comparison is indicative of the cell culture phenotype.

[0020] Alternatively, the present invention provides a method of assessing a cell culture phenotype of a cell line. The method including detecting, in a sample from the cell culture, one or more markers indicative of the cell culture phenotype, wherein the markers are selected from the group consisting of peptides selected from FIGS. 7 through 138, or genes or proteins selected from Tables 1 through 20 and Tables 24 through 30.

[0021] In another aspect, the present invention provides an engineered cell line with an improved cell culture phenotype containing a population of engineered cells, each of which comprises an engineered construct up-regulating or down-regulating one or more proteins identified according to various methods as described above. In particular, the present invention provides an engineered cell line with an improved cellular productivity containing a population of engineered cells, each of which comprises an engineered construct up-regulating or down-regulating one or more genes or proteins selected from Tables 2, 3, and 9 through 12. In some embodiments, the engineered construct is an over-expression construct. In other embodiments, the engineered construct is an interfering RNA construct.

[0022] In other embodiments, the present invention provides an engineered cell line with an improved cell growth rate including a population of engineered cells, each of which includes an engineered construct up-regulating or down-regulating one or more genes or proteins selected from Tables 4, 5, 6, 13, 14, 27 and 28. In some embodiments, the engineered construct is an over-expression construct. In other embodiments, the engineered construct is an interfering RNA construct.

[0023] In other embodiments, the present invention provides an engineered cell line with an improved peak cell density containing a population of engineered cells, each of which includes an engineered construct up-regulating or down-regulating one or more genes or proteins selected from Tables 8, 15, 16, and 17. In some embodiments, the engineered construct is an over-expression construct. In other embodiments, the engineered construct is an interfering RNA construct.

[0024] In other embodiments, the present invention provides an engineered cell line with an improved sustained cell viability containing a population of engineered cells, each of which comprising an engineered construct up-regulating or down-regulating one or more genes or proteins selected from Tables 18 and 26. In some embodiments, the engineered construct is an over-expression construct. In other embodiments, the engineered construct is an interfering RNA construct.

[0025] In other embodiments, the present invention provides an engineered cell line with regulated lactate production or consumption containing a population of engineered cells, each of which comprising an engineered construct up-regulating or down-regulating one or more genes or proteins selected from Tables 29 and 30. In some embodiments, the engineered construct is an over-expression construct. In other embodiments, the engineered construct is an interfering RNA construct.

[0026] In some embodiments, the present invention provides an improved cell line containing a population of engineered cells, each of which comprising an engineered construct up-regulating or down-regulating one or more genes or proteins selected from Table 20, 24, 25 and 26. In some embodiments, the engineered construct is an over-expression construct. In other embodiments, the engineered construct is an interfering RNA construct.

[0027] In yet another aspect, the invention provides a method for expression of a protein of interest using engineered cell lines as described above. The method includes the steps of introducing into an engineered cell line according to any one of the embodiments described above a nucleic acid encoding the protein of interest; and harvesting the protein of interest.

[0028] In still another aspect, the invention also provides isolated genes or proteins, or polynucleotides or polypeptides that are of previously undiscovered genes or proteins, and/or are involved with regulating or indicative of cell culture phenotypes of interest. In particular, the invention provides an isolated or recombinant nucleic acid containing a sequence selected from Tables 9, 13, and 15, complements thereof, and subsequences thereof. The present invention also provides an isolated or recombinant protein containing a sequence selected from Tables 2 and 3, or fragments thereof. The invention also provides genetically engineered expression vectors, host cells, and transgenic animals comprising the nucleic acid molecules or proteins of the invention. The invention additionally provides inhibitory polynucleotides, e.g., antisense and RNA interference (RNAi) molecules, to the nucleic acid molecules of the invention or the nucleic acid encoding the proteins of the invention.

[0029] Other features, objects, and advantages of the present invention are apparent in the detailed description that follows. It should be understood, however, that the detailed description, while indicating embodiments of the present invention, is given by way of illustration only, not limitation. Various changes and modifications within the scope of the invention will become apparent to those skilled in the art from the detailed description.

### BRIEF DESCRIPTION OF THE DRAWINGS

[0030] FIG. 1 is a flowchart of an exemplary method for identifying genes and proteins of the invention.

[0031] FIG. 2 illustrates an exemplary matrix of CHO lines and cellular phenotypes.

[0032] FIG. 3 depicts an exemplary phenotypic comparison between test cell lines and control cell lines for a “high cell growth rate” phenotype.

[0033] FIG. 4 illustrates a method of protein expression profiling.

[0034] FIGS. 5 and 6 depict the Cy3 and Cy5 staining patterns on an exemplary gel and provide graphical depictions of the relative abundance of selected proteins. In FIG. 5, a protein that appears to be 5-fold upregulated in the Cy5-labeled test cell extract is outlined. In FIG. 6, a protein that appears to be 4-fold downregulated in the Cy5-labeled test cell extract is outlined.

[0035] FIGS. 7 through 138 illustrate sequence data and analysis for individual, differentially-expressed proteins.

[0036] FIGS. 139 and 140 schematically depict an unsupervised Pearson Clustering Analysis.

[0037] FIG. 141 depicts an exemplary method of data analysis using pairwise differences.

[0038] FIG. 142 depicts an exemplary method of data analysis that does not rely on pairwise differences.

[0039] FIGS. 143-146 depict exemplary evaluations of identified genes in the 3C7 cell line.

[0040] FIGS. 147 and 148 illustrate a 24 well format for assessing the impact of over-expression of identified genes on cellular growth and productivity.

[0041] Exemplary results of over-expression of identified genes on cellular growth and productivity are illustrated in FIGS. 149-151.

### DETAILED DESCRIPTION OF THE INVENTION

[0042] The present invention provides systematic methods for identifying genes and proteins that influence cell culture phenotypes of interest. The methods of the invention are based on differential expression profiling analysis of industrially relevant cell culture phenotypes through integrated use of DNA microarray and proteomics analysis. Specifically, the method includes generating a gene or protein expression profile of a sample derived from a test cell line; comparing the gene or protein expression profile to a control profile derived from a control cell line which has a cell culture phenotype distinct from that of the test cell line; and identifying one or more differentially expressed genes or proteins based on the comparison. As used herein, the test cell line and the control cell line can be different cell lines with different genetic background or same cell line grown under different cell culture conditions.

[0043] The one or more differentially expressed genes or proteins are candidate genes or proteins that regulate or are indicative of the cell culture phenotype of interest. The identified genes and proteins can be further confirmed and validated. The identified genes or proteins may also be manipulated to improve the cell culture phenotype of interest. Therefore, the present invention represents a significant advance in cell engineering for rational designing of improved cell lines and cell culture conditions.

[0044] Various aspects of the invention are described in further detail in the following subsections. The use of subsections is not meant to limit the invention. Each subsection may apply to any aspect of the invention. In this application, the use of “or” means “and/or” unless stated otherwise.

Cell Lines and Cell Culture Phenotypes

[0045] The present invention contemplates differential expression profiling analysis and optimization of cell lines derived from a variety of organisms, including, but not limited to, bacteria, plants, fungi, and animals (the latter including, but not limited to, insects and mammals). For example, the present invention may be applied to Escherichia coli, Spodoptera frugiperda, Nicotiana sp., Zea mays, Lemna sp., Saccharomyces sp., Pichia sp., Schizosaccharomyces sp., mammalian cells, including, but not limited to, COS cells, CHO cells, 293 cells, A431 cells, 3T3 cells, CV-1 cells, HeLa cells, L cells, BHK21 cells, HL-60 cells, U937 cells, HEK cells, PerC6 cells, Jurkat cells, normal diploid cells, cell strains derived from in vitro culture of primary tissue, and primary explants. The list of organisms and cell lines are meant only to provide nonlimiting examples.

[0046] In particular, the present invention contemplates differential expression profiling analysis of industrially relevant cell lines, such as, for example, CHO cells. CHO cells are a primary host for therapeutic protein production, such as, for example, monoclonal antibody production, receptor productions, and Fc fusion proteins because CHO cells provide fidelity of folding, processing, and glycosylation. CHO cells are also compatible with deep-tank, serum-free culture and have excellent safety records.

[0047] The present invention permits an understanding of pathways, genes and proteins that influence desired cell culture phenotypes or characteristics, for example, cell phenotypes that enable highly productive fed-batch processes. Such desired cell phenotypes include, but are not limited to, high cell growth rate, high peak cell density, sustained high cell viability, high maximum cellular productivity, sustained high cellular productivity, low ammonium production, and low lactate production. Desired phenotypes or characteristics may be inherent properties of established cell lines that have certain genomic backgrounds. Desired phenotypes or characteristics may also be conferred to cells by growing the cells in different conditions, e.g., temperatures, cell densities, the use of agents such as sodium butyrate, to be in different kinetic phases of growth (e.g., lag phase, exponential growth phase, stationary phase or death phase), and/or to become serum-independent, etc. During the period in which these phenotypes are induced, and/or after these phenotypes are achieved, a pool of target nucleic acid or protein samples can be prepared from the cells and analyzed with the oligonucleotide array to determine and identify which genes demonstrate altered expression in response to a particular stimulus (e.g., temperature, sodium butyrate), and therefore are potentially involved in conferring the desired phenotype or characteristic.

Preparation of Pool of Target Nucleic Acids

[0048] In order to conduct gene expression profiling analysis, a pool of target nucleic acids are prepared from a sample derived from a cell line. Any biological sample may be used as a source of target nucleic acids. The pool of target nucleic acids can be total RNA, or any nucleic acid derived therefrom, including each of the single strands of cDNA made by reverse transcription of the mRNA, or RNA transcribed from the double-stranded cDNA intermediate. Methods of isolating target nucleic acids for analysis with an oligonucleotide array or other probes, such as phenol-chloroform extraction, ethanol precipitation, magnetic bead separation, or silica-gel affinity purification, are well known to one of skill in the art.

[0049] For example, various methods are available for isolating or enriching RNA. These methods include, but are not limited to, RNeasy kits (provided by Qiagen), MasterPure kits (provided by Epicentre Technologies), charge-switch technology (see, e.g., U.S. Published patent application Nos. 2003/0054395 and 2003/0130499), and TRIZOL (provided by Gibco BRL). The RNA isolation protocols provided by Affymetrix can also be employed in the present invention. See, e.g., GeneChip® EXPRESSION ANALYSIS TECHNICAL MANUAL (701021 rev. 3, Affymetrix, Inc. 2002).

[0050] Preferably, the pool of target nucleic acids (i.e., mRNA or nucleic acids derived therefrom) should reflect the transcription of gene coding regions. In one example, mRNA is enriched by removing rRNA. Different methods are available for eliminating or reducing the amount of rRNA in a sample. For instance, rRNA can be removed by enzyme digestions. According to the latter method, rRNAs are first amplified using reverse transcriptase and specific primers to produce cDNA. The rRNA is allowed to anneal with the cDNA. The sample is then treated with RNAase H, which specifically digests RNA within an RNA:DNA hybrid.

[0051] Target nucleic acids may be amplified before incubation with an oligonucleotide array or other probes. Suitable amplification methods, including, but not limited to, reverse transcription-polymerase chain reaction, ligase chain reaction, self-sustained sequence replication, and in vitro transcription, are well known in the art. It should be noted that oligonucleotide probes are chosen to be complementary to target nucleic acids. Therefore, if an antisense pool of target nucleic acids is provided (as is often the case when target nucleic acids are amplified by in vitro transcription), the oligonucleotide probes should correspond with subsequences of the sense complement. Conversely, if the pool of target nucleic acids is sense, the oligonucleotide array should be complementary (i.e., antisense) to them. Finally, if target nucleic acids are double-stranded, oligonucleotide probes can be sense or antisense.

[0052] The present invention involves detecting the hybridization intensity between target nucleic acids and complementary oligonucleotide probes. To accomplish this, target nucleic acids may be attached directly or indirectly with appropriate and detectable labels. Direct labels are detectable labels that are directly attached to or incorporated into target nucleic acids. Indirect labels are attached to polynucleotides after hybridization, often by attaching to a binding moiety that was attached to the target nucleic acids prior to hybridization. Such direct and indirect labels are well known in the art. In a preferred embodiment of the invention, target nucleic acids are detected using the biotin-streptavidin-PE coupling system, where biotin is incorporated into target nucleic acids and hybridization is detected by the binding of streptavidin-PE to biotin.

[0053] Target nucleic acids may be labeled before, during or after incubation with an oligonucleotide array. Preferably, the target nucleic acids are labeled before incubation. Labels may be incorporated during the amplification step by using nucleotides that are already labeled (e.g., biotin-coupled dUTP or dCTP) in the reaction. Alternatively, a label may be added directly to the original nucleic acid sample (e.g., mRNA, cDNA) or to the amplification product after the amplification is completed. Means of attaching labels to nucleic acids are well known to those of skill in the art and include, but are not limited to, nick translation, end-labeling, and ligation of target nucleic acids to a nucleic acid linker to join it to a label. Alternatively, several kits specifically designed for isolating and preparing target nucleic acids for microarray analysis are commercially available, including, but not limited to, the GeneChip® IVT Labeling Kit (Affymetrix, Santa Clara, Calif.) and the Bioarray® High Yield® RNA Transcript Labeling Kit with Fluorescein-UTP for Nucleic Acid Arrays (Enzo Life Sciences, Inc., Farmingdale, N.Y.).

[0054] Polynucleotides can be fragmented before being labeled with detectable moieties. Exemplary methods for fragmentation include, but are not limited to, heat or ion-mediated hydrolysis.

Oligonucleotide Arrays

[0055] Probes suitable for the present invention includes oligonucleotide arrays or other probes that capable of detecting the expression of a plurality of genes (including previously undiscovered genes) by a cell (or cell line), including known cells or cells derived from an unsequenced organism, and to identify genes (including previously undiscovered genes) and related pathways that may be involved with the induction of a particular cell phenotype, e.g., increased and efficient transgene expression.

[0056] Oligonucleotide probes used in this invention may be nucleotide polymers or analogs and modified forms thereof such that hybridizing to a pool of target nucleic acids occurs in a sequence specific manner under oligonucleotide array hybridization conditions. As used herein, the term “oligonucleotide array hybridization conditions” refers to the temperature and ionic conditions that are normally used in oligonucleotide array hybridization. In many examples, these conditions include 16-hour hybridization at 45° C., followed by at least three 10-minute washes at room temperature. The hybridization buffer comprises 100 mM MES, 1 M [Na⁺], 20 mM EDTA, and 0.01% Tween 20. The pH of the hybridization buffer can range between 6.5 and 6.7. The wash buffer is 6× SSPET, which contains 0.9 M NaCl, 60 mM NaH2PO4, 6 mM EDTA, and 0.005% Triton X-100. Under more stringent oligonucleotide array hybridization conditions, the wash buffer can contain 100 mM MES, 0.1 M [Na⁺], and 0.01% Tween 20. See also GENECHIP® EXPRESSION ANALYSIS TECHNICAL MANUAL (701021 rev. 3, Affymetrix, Inc. 2002), which is incorporated herein by reference in its entirety.

[0057] As is known by one of skill in the art, oligonucleotide probes can be of any length. Preferably, oligonucleotide probes suitable for the invention are 20 to 70 nucleotides in length. Most preferably, suitable oligonucleotide probes are 25 nucleotides in length. In one embodiment, the nucleic acid probes of the present invention have relatively high sequence complexity. In many examples, the probes do not contain long stretches of the same nucleotide. In addition, the probes may be designed such that they do not have a high proportion of G or C residues at the 3′ ends. In another embodiment, the probes do not have a 3′ terminal T residue. Depending on the type of assay or detection to be performed, sequences that are predicted to form hairpins or interstrand structures, such as “primer dimers,” can be either included in or excluded from the probe sequences. In many embodiments, each probe employed in the present invention does not contain any ambiguous base.

[0058] Oligonucleotide probes are made to be specific for (e.g., complementary to (i.e., capable of hybridizing to)) a template sequence. Any part of a template sequence can be used to prepare probes. Multiple probes, e.g., 5, 10, 15, 20, 25, 30, or more, can be prepared for each template sequence. These multiple probes may or may not overlap each other. Overlap among different probes may be desirable in some assays. In many embodiments, the probes for a template sequence have low sequence identities with other template sequences, or the complements thereof. For instance, each probe for a template sequence can have no more than 70%, 60%, 50% or less sequence identity with other template sequences, or the complements thereof. This reduces the risk of undesired cross-hybridization. Sequence identity can be determined using methods known in the art. These methods include, but are not limited to, BLASTN, FASTA, and FASTDB. The Genetics Computer Group (GCG) program, which is a suite of programs including BLASTN and FASTA, can also be used. Preferable sequences for template sequences include, but are not limited to, consensus sequences, transgene sequences, and control sequences (i.e., sequences used to control or normalize for variation between experiments, samples, stringency requirements, and target nucleic acid preparations). Additionally, any subsequence of consensus, transgene and control sequences can be used as a template sequence.

[0059] In one embodiment, only certain regions (i.e., tiling regions) of consensus, transgene and control sequences are used as template sequences for the oligonucleotide probes used in this invention. One of skill in the art will recognize that protocols that may be used in practicing the invention, e.g., in vitro transcription protocols, often result in a bias toward the 3′-ends of target nucleic acids. Consequently, in one embodiment of the invention, the region of the consensus sequence or transgene sequence closest to the 3′-end of a consensus sequence is most often used as a template for oligonucleotide probes. Generally, if a poly-A signal could be identified, the 1400 nucleotides immediately prior to the end of the consensus or transgene sequences are designated as a tiling region. Alternatively, if a poly-A signal could not be identified, only the last 600 nucleotides of the consensus or transgene sequence are designated as a tiling region. However, it should be noted that the invention is not limited to using only these tiling regions within the consensus, transgene and control sequences as templates for the oligonucleotide probes. Indeed, a tiling region may occur anywhere within the consensus, transgene or control sequences. For example, the tiling region of a control sequence may comprise regions from both the 5′ and 3′-ends of the control sequence. In fact, the entire consensus, transgene or control sequence may be used as a template for oligonucleotide probes.

[0060] An oligonucleotide array suitable for the invention may include perfect match probes to a plurality of consensus sequences (i.e., consensus sequences for multi-sequence clusters, and consensus sequences for exemplar sequences) identified as described above. The oligonucleotide array suitable for the invention may also include perfect match probes to both consensus and transgene sequences. It will be apparent to one of skill in the art that inclusion of oligonucleotide probes to transgene sequences will be useful when a cell line is genetically engineered to express a recombinant protein encoded by a transgene sequence, and the purpose of the analysis is to confirm expression of the transgene and determine the level of such expression. In those cases where the transgene is linked in a bicistronic mRNA to a downstream ORF, such as dihydrofolate reductase (DHFR), the level of transgene expression may also be determined from the level of expression of the downstream sequence. In another embodiment of the invention, the oligonucleotide array further comprises control probes that normalize the inherent variation between experiments, samples, stringency requirements, and preparations of target nucleic acids. Exemplary compositions of each of these types of control probes is described in U.S. Pat. No. 6,040,138 and in U.S. Publication No. 20060010513, the teachings of both of which are incorporated herein in their entirety by reference.

[0061] It is well known to one of skill in the art that two pools of target nucleic acids individually processed from the same sample can hybridize to two separate but identical oligonucleotide arrays with varying results. The varying results between these arrays are attributed to several factors, such as the intensity of the labeled pool of target nucleic acids and incubation conditions. To control for these variations, normalization control probes can be added to the array. Normalization control probes are oligonucleotides exactly complementary to known nucleic acid sequences spiked into the pool of target nucleic acids. Any oligonucleotide sequence may serve as a normalization control probe. For example, the normalization control probes may be created from a template obtained from an organism other than that from which the cell line being analyzed is derived. In one embodiment, an oligonucleotide array to mammalian sequences will contain normalization oligonucleotide probes to the following genes: bioB, bioC, and bioD from the organism Escherichia coli, cre from the organism Bacteriophage PI, and dap from the organism Bacillus subtilis, or subsequences thereof. The signal intensity received from the normalization control probes are then used to normalize the signal intensities from all other probes in the array. Additionally, when the known nucleic acid sequences are spiked into the pool of target nucleic acids at known and different concentrations for each transcript, a standard curve correlating signal intensity with transcript concentration can be generated, and expression levels for all transcripts represented on the array can be quantified (see, e.g., Hill et al. (2001) Genome Biol. 2(12):research0055.1-0055.13).

[0062] Due to the naturally differing metabolic states between cells, expression of specific target nucleic acids vary from sample to sample. In addition, target nucleic acids may be more prone to degradation in one pool compared to another pool. Consequently, in another embodiment of the invention, the oligonucleotide array further comprises oligonucleotide probes that are exactly complementary to constitutively expressed genes, or subsequences thereof, that reflect the metabolic state of a cell. Nonlimiting examples of these types of genes are beta-actin, transferrin receptor and glyceraldehyde-3-phosphate dehydrogenase (GAPDH).

[0063] In one embodiment of the invention, the pool of target nucleic acids is derived by converting total RNA isolated from the sample into double-stranded cDNA and transcribing the resulting cDNA into complementary RNA (cRNA) using methods described in U.S. Publication No. 20060010513, the teachings of which are incorporated herein in their entirety by reference. The RNA conversion protocol is started at the 3′-end of the RNA transcript, and if the process is not allowed to go to completion (if, for example, the RNA is nicked, etc.) the amount of the 3′-end message compared to the 5′-end message will be greater, resulting in a 3′-bias. Additionally, RNA degradation may start at the 5′-end (Jacobs Anderson et al. (1998) EMBO J. 17:1497-506). The use of these methods suggests that control probes that measure the quality of the processing and the amount of degradation of the sample preferably should be included in the oligonucleotide array. Examples of such control probes are oligonucleotides exactly complementary to 3′- and 5′-ends of constitutively expressed genes, such as beta-actin, transferrin receptor and GAPDH, as mentioned above. The resulting 3′ to 5′ expression ratio of a constitutively expressed gene is then indicative of the quality of processing and the amount of degradation of the sample; i.e., a 3′ to 5′ ratio greater than three (3) indicates either incomplete processing or high RNA degradation (Auer et al. (2003) Nat. Genet. 35:292-93). Consequently, in a preferred embodiment of the invention, the oligonucleotide array includes control probes that are complementary to the 3′- and 5′-ends of constitutively expressed genes.

[0064] The quality of the pool of target nucleic acids is not only reflected in the processing and degradation of the target nucleic acids, but also in the origin of the target nucleic acids. Contaminating sequences, such as genomic DNA, may interfere with well-known quantification protocols. Consequently, in a preferred embodiment of the invention, the array further comprises oligonucleotide probes exactly complementary to bacterial genes, ribosomal RNAs, and/or genomic intergenic regions to provide a means to control for the quality of the sample preparation. These probes control for the possibility that the pool of target nucleic acids is contaminated with bacterial DNA, non-mRNA species, and genomic DNA. Such exemplary control sequences are disclosed in U.S. Publication No. 20060010513, the teaching of which are incorporated herein in their entirety by reference.

[0065] In a preferred embodiment of the invention, the oligonucleotide array further comprises control mismatch oligonucleotide probes for each perfect match probe. The mismatch probes control for hybridization specificity. Preferably, mismatch control probes are identical to their corresponding perfect match probes with the exception of one or more substituted bases. More preferably, the substitution(s) occurs at a central location on the probe. For example, where a perfect match probe is 25 oligonucleotides in length, a corresponding mismatch probe will have the identical length and sequence except for a single-base substitution at position 13 (e.g., substitution of a thymine for an adenine, an adenine for a thymine, a cytosine for a guanine, or a guanine for a cytosine). The presence of one or more mismatch bases in the mismatch oligonucleotide probe disallows target nucleic acids that bind to complementary perfect match probes to bind to corresponding mismatch control probes under appropriate conditions. Therefore, mismatch oligonucleotide probes indicate whether the incubation conditions are optimal, i.e., whether the stringency being utilized provides for target nucleic acids binding to only exactly complementary probes present in the array.

[0066] For each template, a set of perfect match probes exactly complementary to subsequences of consensus, transgene, and/or control sequences (or tiling regions thereof) may be chosen using a variety of strategies. It is known to one of skill in the art that each template can provide for a potentially large number of probes. As is known, apparent probes are sometimes not suitable for inclusion in the array. This can be due to the existence of similar subsequences in other regions of the genome, which causes probes directed to these subsequences to cross-hybridize and give false signals. Another reason some apparent probes may not be suitable for inclusion in the array is because they may form secondary structures that prevent efficient hybridization. Finally, hybridization of target nucleic acids with (or to) an array comprising a large number of probes requires that each of the probes hybridizes to its specific target nucleic acid sequence under the same incubation conditions.

[0067] An oligonucleotide array may comprise one perfect match probe for a consensus, transgene, or control sequence, or may comprise a probeset (i.e., more than one perfect match probe) for a consensus, transgene, or control sequence. For example, an oligonucleotide array may comprise 1, 5, 10, 25, 50, 100, or more than 100 different perfect match probes for a consensus, transgene or control sequence. In a preferred embodiment of the invention, the array comprises at least 11-50 different perfect match oligonucleotide probes exactly complementary to subsequences of each consensus and transgene sequence. In an even more preferred embodiment, only the most optimal probeset for each template is included. The suitability of the probes for hybridization can be evaluated using various computer programs. Suitable programs for this purpose include, but are not limited to, LaserGene (DNAStar), Oligo (National Biosciences, Inc.), MacVector (Kodak/IBI), and the standard programs provided by the GCG. Any method or software program known in the art may be used to prepare probes for the template sequences of the present invention. For example, oligonucleotide probes may be generated by using Array Designer, a software package provided by TeleChem International, Inc (Sunnyvale, Calif.). Another exemplary algorithm for choosing optimal probe sets is described in U.S. Pat. No. 6,040,138, the teachings of which are hereby incorporated by reference. Other suitable means to optimize probesets, which will result in a comparable oligonucleotide array, are well known in the art and may be found in, e.g., Lockhart et al. (1996) Nat. Biotechnol. 14:1675-80 and Mei et al. (2003) Proc. Natl. Acad. Sci. USA 100:11237-42.

[0068] The oligonucleotide probes of the present invention can be synthesized using a variety of methods. Examples of these methods include, but are not limited to, the use of automated or high throughput DNA synthesizers, such as those provided by Millipore, GeneMachines, and BioAutomation. In many embodiments, the synthesized probes are substantially free of impurities. In many other embodiments, the probes are substantially free of other contaminants that may hinder the desired functions of the probes. The probes can be purified or concentrated using numerous methods, such as reverse phase chromatography, ethanol precipitation, gel filtration, electrophoresis, or any combination thereof.

[0069] More detailed information of making an oligonucleotide array suitable for the present invention and exemplary arrays are disclosed in U.S. Publication No. 20060010513, the disclosures of which are hereby incorporated by reference. As described in U.S. Publication No. 20060010513, a CHO chip microarray suitable for the invention includes 122 array quality control sequences (non-CHO), 732 public hamster sequences, 2835 library-derived CHO sequences, and 22 product/process specific sequences. Additional suitable arrays are described in U.S. Pat. No. 6,040,138, the disclosures of which are incorporated by reference.

Incubation of Target Nucleic Acids with an Array to Form a Hybridization Profile

[0070] Incubation reactions can be performed in absolute or differential hybridization formats. In the absolute hybridization format, polynucleotides derived from one sample are hybridized to the probes in an oligonucleotide array. Signals detected after the formation of hybridization complexes correlate to the polynucleotide levels in the sample. In the differential hybridization format, polynucleotides derived from two samples are labeled with different labeling moieties. A mixture of these differently labeled polynucleotides is added to an oligonucleotide array. The oligonucleotide array is then examined under conditions in which the emissions from the two different labels are individually detectable. In one embodiment, the fluorophores Cy3 and Cy5 (Amersham Pharmacia Biotech, Piscataway, N.J.) are used as the labeling moieties for the differential hybridization format.

[0071] In the present invention, the incubation conditions should be such that target nucleic acids hybridize only to oligonucleotide probes that have a high degree of complementarity. In a preferred embodiment, this is accomplished by incubating the pool of target nucleic acids with an oligonucleotide array under a low stringency condition to ensure hybridization, and then performing washes at successively higher stringencies until the desired level of hybridization specificity is reached. In other embodiments, target nucleic acids are incubated with an array of the invention under stringent or well-known oligonucleotide array hybridization conditions. In many examples, these oligonucleotide array hybridization conditions include 16-hour hybridization at 45 ° C., followed by at least three 10-minute washes at room temperature. The hybridization buffer comprises 100 mM MES, 1 M [Na⁺], 20 mM EDTA, and 0.01% Tween 20. The pH of the hybridization buffer can range between 6.5 and 6.7. The wash buffer is 6× SSPET, which contains 0.9 M NaCl, 60 mM NaH₂PO₄, 6 mM EDTA, and 0.005% Triton X-100. Under more stringent oligonucleotide array hybridization conditions, the wash buffer can contain 100 mM MES, 0.1 M [Na⁺], and 0.01% Tween 20. See also GENECHIP® EXPRESSION ANALYSIS TECHNICAL MANUAL (701021 rev. 3, Affymetrix, Inc. 2002), which is incorporated herein by reference in its entirety.

Differential Gene Expression Profiling Analysis

[0072] Methods used to detect the hybridization profile of target nucleic acids with oligonucleotide probes are well known in the art. In particular, means of detecting and recording fluorescence of each individual target nucleic acid-oligonucleotide probe hybrid have been well established and are well known in the art, described in, e.g., U.S. Pat. No. 5,631,734, U.S. Publication No. 20060010513, incorporated herein in their entirety by reference. For example, a confocal microscope can be controlled by a computer to automatically detect the hybridization profile of the entire array. Additionally, as a further nonlimiting example, the microscope can be equipped with a phototransducer attached to a data acquisition system to automatically record the fluorescence signal produced by each individual hybrid.

[0073] It will be appreciated by one of skill in the art that evaluation of the hybridization profile is dependent on the composition of the array, i.e., which oligonucleotide probes were included for analysis. For example, where the array includes oligonucleotide probes to consensus sequences only, or consensus sequences and transgene sequences only, (i.e., the array does not include control probes to normalize for variation between experiments, samples, stringency requirements, and preparations of target nucleic acids), the hybridization profile is evaluated by measuring the absolute signal intensity of each location on the array. Alternatively, the mean, trimmed mean (i.e., the mean signal intensity of all probes after 2-5% of the probesets with the lowest and highest signal intensities are removed), or median signal intensity of the array may be scaled to a preset target value to generate a scaling factor, which will subsequently be applied to each probeset on the array to generate a normalized expression value for each gene (see, e.g., Affymetrix (2000) Expression Analysis Technical Manual, pp. A5-14). Conversely, where the array further comprises control oligonucleotide probes, the resulting hybridization profile is evaluated by normalizing the absolute signal intensity of each location occupied by a test oligonucleotide probe by means of mathematical manipulations with the absolute signal intensity of each location occupied by a control oligonucleotide probe. Typical normalization strategies are well known in the art, and are included, for example, in U.S. Pat. No. 6,040,138 and Hill et al. (2001) Genome Biol. 2(12):research0055.1-0055.13.

[0074] Signals gathered from oligonucleotide arrays can be analyzed using commercially available software, such as those provide by Affymetrix or Agilent Technologies. Controls, such as for scan sensitivity, probe labeling and cDNA or cRNA quantitation, may be included in the hybridization experiments. The array hybridization signals can be scaled or normalized before being subjected to further analysis. For instance, the hybridization signal for each probe can be normalized to take into account variations in hybridization intensities when more than one array is used under similar test conditions. Signals for individual target nucleic acids hybridized with complementary probes can also be normalized using the intensities derived from internal normalization controls contained on each array. In addition, genes with relatively consistent expression levels across the samples can be used to normalize the expression levels of other genes.

[0075] To identify genes that confer or correlate with a desired phenotype or characteristic, a gene expression profile of a sample derived from a test cell line is compared to a control profile derived from a control cell line that has a cell culture phenotype of interest distinct from that of the test cell line and differentially expressed genes are identified. For example, the method for identifying the genes and related pathways involved in cellular productivity may include the following: 1) growing a first sample of a first cell line with a particular cellular productivity and growing a second sample of a second cell line with a distinct cellular productivity; 2) isolating, processing, and hybridizing total RNA from the first sample to a first oligonucleotide array; 3) isolating, processing, and hybridizing total RNA from the second sample to a second oligonucleotide array; and 4) comparing the resulting hybridization profiles to identify the sequences that are differentially expressed between the first and second samples. Similar methods can be used to identify genes involved in other phenotypes.

[0076] Typically, each cell line was represented by at least three biological replicates. Programs known in the art, e.g., GeneExpress 2000 (Gene Logic, Gaithersburg, Md.), were used to analyze the presence or absence of a target sequence and to determine its relative expression level in one cohort of samples (e.g., cell line or condition or time point) compared to another sample cohort. A probeset called present in all replicate samples was considered for further analysis. Generally, fold-change values of 1.2-fold, 1.5-fold or greater were considered statistically significant if the p-values were less than or equal to 0.05.

[0077] The identification of differentially expressed genes that correlate with one or more particular cell phenotypes (e.g., cell growth rate, peak cell density, sustained high cell viability, maximum cellular productivity, sustained high cellular productivity, ammonium production or consumption, lactate production or consumption, etc.) can lead to the discovery of genes and pathways, including those were previously undiscovered, that regulate or are indicative of the cell phenotypes.

[0078] The subsequently identified genes are sequenced and the sequences are blasted against various databases to determine whether they are known genes or unknown genes. If genes are known, pathway analysis can be conducted based on the existing knowledge in the art. Both known and unknown genes are further confirmed or validated by various methods known in the art. For example, the identified genes may be manipulated (e.g., up-regulated or down-regulated) to induce or suppress the particular phenotype by the cells.

[0079] A harmonized decision tree illustrating this process is shown in FIG. 1. More detailed identification and validation steps are further described in the Examples and exemplary differentially expressed genes identified using the method of the invention are shown in Tables 9 through 16.

Differential Protein Expression Profiling Analysis

[0080] The present invention also provide methods for identifying differentially expressed proteins by protein expression profiling analysis. Protein expression profiles can be generated by any method permitting the resolution and detection of proteins from a sample from a cell line. Methods with higher resolving power are generally preferred, as increased resolution can permit the analysis of greater numbers of individual proteins, increasing the power and usefulness of the profile. A sample can be pre-treated to remove abundant proteins from a sample, such as by immunodepletion, prior to protein resolution and detection, as the presence of an abundant protein may mask more subtle changes in expression of other proteins, particularly for low-abundance proteins. A sample can also be subjected to one or more procedures to reduce the complexity of the sample. For example, chromatography can be used to fractionate a sample; each fraction would have a reduced complexity, facilitating the analysis of the proteins within the fractions.

[0081] Three useful methods for simultaneously resolving and detecting several proteins include array-based methods; mass-spectrometry based methods; and two-dimensional gel electrophoresis based methods.

[0082] Protein arrays generally involve a significant number of different protein capture reagents, such as antibodies or antibody variable regions, each immobilized at a different location on a solid support. Such arrays are available, for example, from Sigma-Aldrich as part of their Panorama® line of arrays. The array is exposed to a protein sample and the capture reagents selectively capture the specific protein targets. The captured proteins are detected by detection of a label. For example, the proteins can be labeled before exposure to the array; detection of a label at a particular location on the array indicates the detection of the corresponding protein. If the array is not saturated, the amount of label detected may correlate with the concentration or amount of the protein in the sample. Captured proteins can also be detected by subsequent exposure to a second capture reagent, which can itself be labeled or otherwise detected, as in a sandwich immunoassay format.

[0083] Mass spectrometry-based methods include, for example, matrix-assisted laser desorption/ionization (MALDI), Liquid Chromatography/Mass Spectrometry/Mass Spectrometry (LC-MS/MS) and surface enhanced laser desorption/ionization (SELDI) techniques. For example, a protein profile can be generated using electrospray ionization and MALDI. SELDI, as described, for example, in U.S. Pat. No. 6,225,047, incorporates a retention surface on a mass spectrometry chip. A subset of proteins in a protein sample are retained on the surface, reducing the complexity of the mixture. Subsequent time-of-flight mass spectrometry generates a “fingerprint” of the retained proteins.

[0084] In methods involving two-dimensional gel electrophoresis, proteins in a sample are generally separated in a first dimension by isoelectric point and in a second dimension by molecular weight during SDS-PAGE. By virtue of the two dimensions of resolution, hundreds or thousands of proteins can be simultaneously resolved and analyzed. The proteins are detected by application of a stain, such as a silver stain, or by the presence of a label on the proteins, such as a Cy2, Cy3, or Cy5 dye. To identify a protein, a gel spot can be cut out and in-gel tryptic digestion performed. The tryptic digest can be analyzed by mass spectrometry, such as MALDI. The resulting mass spectrum of peptides, the peptide mass fingerprint or PMF, is searched against a sequence database. The PMF is compared to the masses of all theoretical tryptic peptides generated in silico by the search program. Programs such as Prospector, Sequest, and MasCot (Matrix Science, Ltd., London, UK) can be used for the database searching. For example, MasCot produces a statistically-based Mowse score indicates if any matches are significant or not. MS/MS can be used to increase the likelihood of getting a database match. CID-MS/MS (collision induced dissociation of tandem MS) of peptides can be used to give a spectrum of fragment ions that contain information about the amino acid sequence. Adding this information to a peptide mass fingerprint allows Mascot to increase the statistical significance of a match. It is also possible in some cases to identify a protein by submitting only a raw MS/MS spectrum of a single peptide.

[0085] A recent improvement in comparisons of protein expression profiles involves the use of a mixture of two or more protein samples, each labeled with a different, spectrally-resolvable, charge- and mass-matched dye, such as Cy3 and Cy5. This improvement, called fluorescent 2-dimensional differential in-gel electrophoresis (DIGE), has the advantage that the test and control protein samples are run in the same gel, facilitating the matching of proteins between the two samples and avoiding complications involving non-identical electrophoresis conditions in different gels. The gels are imaged separately and the resulting images can be overlaid directly without further modification. A third spectrally-resolvable dye, such as Cy2, can be used to label a pool of protein samples to serve as an internal control among different gels run in an experiment. Thus, all detectable proteins are included as an internal standard, facilitating comparisons across different gels.

Engineering Cell Lines to Improve Cell Phenotypes

[0086] As described above, the present invention provides polynucleotide sequences (or subsequences) of genes or polypeptide sequences (or subsequences) of proteins that are differentially expressed in different cell lines or cell samples with at least one distinct cell phenotype. These sequences are collectively referred to as differential sequences. The differential sequences may be used as targets to effect a cell phenotype, particularly a phenotype characterized by increased and efficient production of a recombinant transgene, increased cell growth rate, high peak cell density, sustained high cell viability, high maximum cellular productivity, sustained high cellular productivity, low ammonium production, and low lactate production, etc.

[0087] More particularly, the invention provides each purified and/or isolated polynucleotide or polypeptide sequence referred to in the relevant Tables that is shown to be a suitable target for regulating a CHO cell phenotype, i.e., is differentially expressed by a first CHO cell line compared to a second CHO cell line, herein designated as “differential CHO sequence.” Specifically, as used herein, a differential CHO sequence include a sequence having and/or consisting essentially of a sequence selected from the gene sequences referenced in the Tables, a fragment or a complement thereof. As used herein, a differential CHO sequence also includes a polypeptide sequence selected from the protein sequences referenced in the Tables, or a fragment thereof. As used herein, a differential CHO sequence also includes a polynucleotide sequence encoding a polypeptide sequence selected from the protein sequences referenced in the Tables, a fragment or a complement thereof. A skilled artisan will recognize that the differential CHO sequences of the invention may include novel CHO sequences (as discussed below), known gene sequences that are attributed with a function that is, or was, not obviously involved in transgene expression, and known sequences that previously had no known function but may now be known to function as targets in regulating a CHO cell phenotype.

[0088] The present invention contemplates methods and compositions that may be used to alter (i.e., regulate (e.g., enhance, reduce, or modify)) the expression and/or the activity of the genes or proteins corresponding to the differential CHO sequences in a cell or organism. Altered expression of the differential CHO sequences encompassed by the present invention in a cell or organism may be achieved through down-regulating or up-regulating of the corresponding genes or proteins. For example, the differential CHO sequences may be down-regulated by the use of various inhibitory polynucleotides, such as antisense polynucleotides, ribozymes that bind and/or cleave the mRNA transcribed from the genes of the invention, triplex-forming oligonucleotides that target regulatory regions of the genes, and short interfering RNA that causes sequence-specific degradation of target mRNA (e.g., Galderisi et al. (1999) J. Cell. Physiol. 181:251-57; Sioud (2001) Curr. Mol. Med. 1:575-88; Knauert and Glazer (2001) Hum. Mol. Genet. 10:2243-51; Bass (2001) Nature 411:428-29).

[0089] The inhibitory antisense or ribozyme polynucleotides suitable for the invention can be complementary to an entire coding strand of a gene of the invention, or to only a portion thereof. Alternatively, inhibitory polynucleotides can be complementary to a noncoding region of the coding strand of a gene of the invention. The inhibitory polynucleotides of the invention can be constructed using chemical synthesis and/or enzymatic ligation reactions using procedures well known in the art. The nucleoside linkages of chemically synthesized polynucleotides can be modified to enhance their ability to resist nuclease-mediated degradation, as well as to increase their sequence specificity. Such linkage modifications include, but are not limited to, phosphorothioate, methylphosphonate, phosphoroamidate, boranophosphate, morpholino, and peptide nucleic acid (PNA) linkages (Galderisi et al., supra; Heasman (2002) Dev. Biol. 243:209-14; Mickelfield (2001) Curr. Med. Chem. 8:1157-70). Alternatively, antisense molecules can be produced biologically using an expression vector into which a polynucleotide of the present invention has been subcloned in an antisense (i.e., reverse) orientation.

[0090] In yet another embodiment, the antisense polynucleotide molecule suitable for the invention is an α-anomeric polynucleotide molecule. An α-anomeric polynucleotide molecule forms specific double-stranded hybrids with complementary RNA in which, contrary to the usual β-units, the strands run parallel to each other. The antisense polynucleotide molecule can also comprise a 2′-o-methylribonucleotide or a chimeric RNA-DNA analogue, according to techniques that are known in the art.

[0091] The inhibitory triplex-forming oligonucleotides (TFOs) suitable for the present invention bind in the major groove of duplex DNA with high specificity and affinity (Knauert and Glazer, supra). Expression of the genes of the present invention can be inhibited by targeting TFOs complementary to the regulatory regions of the genes (i.e., the promoter and/or enhancer sequences) to form triple helical structures that prevent transcription of the genes.

[0092] In one embodiment of the invention, the inhibitory polynucleotides are short interfering RNA (siRNA) molecules. These siRNA molecules are short (preferably 19-25 nucleotides; most preferably 19 or 21 nucleotides), double-stranded RNA molecules that cause sequence-specific degradation of target mRNA. This degradation is known as RNA interference (RNAi) (e.g., Bass (2001) Nature 411:428-29). Originally identified in lower organisms, RNAi has been effectively applied to mammalian cells and has recently been shown to prevent fulminant hepatitis in mice treated with siRNA molecules targeted to Fas MRNA (Song et al. (2003) Nat. Med. 9:347-51). In addition, intrathecally delivered siRNA has recently been reported to block pain responses in two models (agonist-induced pain model and neuropathic pain model) in the rat (Dom et al. (2004) Nucleic Acids Res. 32(5):e49).

[0093] The siRNA molecules suitable for the present invention can be generated by annealing two complementary single-stranded RNA molecules together (one of which matches a portion of the target mRNA) (Fire et al., U.S. Pat. No. 6,506,559) or through the use of a single hairpin RNA molecule that folds back on itself to produce the requisite double-stranded portion (Yu et al. (2002) Proc. Natl. Acad. Sci. USA 99:6047-52). The siRNA molecules can be chemically synthesized (Elbashir et al. (2001) Nature 411:494-98) or produced by in vitro transcription using single-stranded DNA templates (Yu et al., supra). Alternatively, the siRNA molecules can be produced biologically, either transiently (Yu et al., supra; Sui et al. (2002) Proc. Natl. Acad. Sci. USA 99:5515-20) or stably (Paddison et al. (2002) Proc. Natl. Acad. Sci. USA 99:1443-48), using an expression vector(s) containing the sense and antisense siRNA sequences. Recently, reduction of levels of target mRNA in primary human cells, in an efficient and sequence-specific manner, was demonstrated using adenoviral vectors that express hairpin RNAs, which are further processed into siRNAs (Arts et al. (2003) Genome Res. 13:2325-32).

[0094] The siRNA molecules targeted to the differential CHO sequences of the present invention can be designed based on criteria well known in the art (e.g., Elbashir et al. (2001) EMBO J. 20:6877-88). For example, the target segment of the target mRNA should begin with AA (preferred), TA, GA, or CA; the GC ratio of the siRNA molecule should be 45-55%; the siRNA molecule should not contain three of the same nucleotides in a row; the siRNA molecule should not contain seven mixed G/Cs in a row; and the target segment should be in the ORF region of the target mRNA and should be at least 75 bp after the initiation ATG and at least 75 bp before the stop codon. siRNA molecules targeted to the polynucleotides of the present invention can be designed by one of ordinary skill in the art using the aforementioned criteria or other known criteria.

[0095] Down-regulation of the genes or proteins of the present invention in a cell or organism may also be achieved through the creation of cells or organisms whose endogenous genes corresponding to the differential CHO sequences of the present invention have been disrupted through insertion of extraneous polynucleotides sequences (i.e., a knockout cell or organism). The coding region of the endogenous gene may be disrupted, thereby generating a nonfunctional protein. Alternatively, the upstream regulatory region of the endogenous gene may be disrupted or replaced with different regulatory elements, resulting in the altered expression of the still-functional protein. Methods for generating knockout cells include homologous recombination and are well known in the art (e.g., Wolfer et al. (2002) Trends Neurosci. 25:336-40).

[0096] The expression or activity of the CHO differential sequences may also be altered by up-regulating the genes or proteins corresponding to the CHO differential sequences of the invention. Up-regulation includes providing an exogenous nucleic acid (e.g., an over-expression construct) encoding a protein or gene of interest or a variant retaining its activity or providing a factor or a molecule indirectly enhancing the protein activity. The variant generally shares common structural features with the protein or gene of interest and should retain the activity permitting the improved cellular phenotype. The variant may correspond to a homolog from another species (e.g. a rodent homolog; a primate homolog, such as a human homolog; an other mammalian homolog; or a more distant homolog retaining sequence conservation sufficient to convey the desired effect on cellular phenotype). In some cases, the variant may retain at least 70%, at least 80%, at least 90%, or at least 95% sequence identity with the CHO sequence or with a known homolog. In certain embodiments, the variant is a nucleic acid molecule that hybridizes under stringent conditions to the CHO nucleic acid sequence or to the nucleic acid sequence of a known homolog.

[0097] For example, the isolated polynucleotides corresponding to the differential CHO sequences of the present invention may be operably linked to an expression control sequence such as the pMT2 and pED expression vectors for recombinant production of differentially expressed genes or proteins of the invention. General methods of expressing recombinant proteins are well known in the art.

[0098] The expression or activity of the differentially expressed genes or proteins of the present invention may also be altered by exogenous agents, small molecules, pharmaceutical compounds, or other factors that may be directly or indirectly modulating the activity of the genes or proteins of the present invention. As a result, these agents, small molecules, pharmaceutical compounds, or other factors may be used to regulate the phenotype of CHO cells, e.g., increased production of a recombinant transgene, increased cell growth rate, high peak cell density, sustained high cell viability, high maximum cellular productivity, sustained high cellular productivity, low ammonium production, and low lactate production, etc.

[0099] Any combinations of the methods of altering gene or protein expression described above are within the scope of the invention. Any combination of genes or proteins affecting different cell phenotypes can be modulated based on the methods described herein and are within the scope of the invention.

Novel Genes or Proteins

[0100] As described above, the present invention provides differential sequences including sequences newly discovered to be expressed by CHO cells. Accordingly, the present invention provides novel isolated and/or purified polynucleotides that are at least part of previously undiscovered genes. Exemplary novel polynucleotide sequences (or subsequences) of genes that are newly discovered expressed by CHO cells are illustrated in Tables 9, 13, and 15. The present invention also provides isolated and/or purified polypeptides that are at least part of previously undiscovered proteins. Exemplary novel polypeptide sequences (or subsequences) of proteins that are newly discovered expressed by CHO cells are illustrated in Tables 2 and 4. The present invention also provides novel polynucleotides encoding the polypeptides sequences as illustrated in Tables 2 and 4.

[0101] Thus, the invention provides each purified and/or isolated polynucleotide sequence selected from Tables 9, 13, and 15 that is, or is part of, a previously undiscovered gene (i.e., a gene that had not been sequenced and/or shown to be expressed by CHO cells) and is verifiably expressed by CHO cells. Alternatively, the invention provides each purified and/or isolated polypeptide sequence selected from Tables 2 and 4 that is, or is part of, a previously undiscovered protein (i.e., a protein that had not been sequenced and/or shown to be expressed by CHO cells) and is verifiably expressed by CHO cells. The invention also provides isolated and/or purified polynucleotide sequence encoding each polypeptides sequence selected from Tables 2 and 4. These sequences are herein collectively designated as “novel CHO sequences.” Preferred polynucleotide sequences of the invention include DNA sequences including genomic and cDNA sequences and chemically synthesized DNA sequences, RNA sequences, or other modified nucleic acid sequences. Preferred polypeptide sequences of the invention include amino acid sequences or modified amino acid sequences.

[0102] It is part of the invention to provide inhibitory polynucleotides to each novel CHO sequence as described above. Polynucleotides of the present invention also include polynucleotides that hybridize under stringent conditions to novel CHO sequences, or complements thereof, and/or encode polypeptides that retain substantial biological activity of polypeptides encoded by novel CHO sequences of the invention. Polynucleotides of the present invention also include continuous portions of novel CHO sequences comprising at least 21 consecutive nucleotides.

[0103] Polynucleotides of the present invention also include polynucleotides that encode any of the amino acid sequences encoded by the polynucleotides as described above, or continuous portions thereof, and that differ from the polynucleotides described above only due to the well-known degeneracy of the genetic code.

[0104] The isolated polynucleotides of the present invention may be used as hybridization probes (e.g., as an oligonucleotide array, as described above) and primers to identify and isolate nucleic acids having sequences identical to, or similar to, those encoding the disclosed polynucleotides. Hybridization methods for identifying and isolating nucleic acids include polymerase chain reaction (PCR), Southern hybridization, and Northern hybridization, and are well known to those skilled in the art.

[0105] Hybridization reactions can be performed under conditions of different stringencies. The stringency of a hybridization reaction includes the difficulty with which any two nucleic acid molecules will hybridize to one another. Preferably, each hybridizing polynucleotide hybridizes to its corresponding polynucleotide under reduced stringency conditions, more preferably stringent conditions, and most preferably highly stringent conditions. Examples of stringency conditions are shown in Table 1 below: highly stringent conditions are those that are at least as stringent as, for example, conditions A-F; stringent conditions are at least as stringent as, for example, conditions G-L; and reduced stringency conditions are at least as stringent as, for example, conditions M-R.

TABLE 1
Stringency Conditions

| | | | Hybridization | |
|---|---|---|---|---|
| Stringency | Poly-nucleotide | | Temperature and | Wash Temp. |
| Condition | Hybrid | Hybrid Length (bp)¹ | Buffer^{H} | and Buffer^{H} |
| A | DNA:DNA | >50 | 65° C.; 1xSSC -or- | 65° C.; 0.3xSSC |
| | | | 42° C.; 1xSSC, 50% | |
| | | | formamide | |
| B | DNA:DNA | <50 | T_{B}*; 1xSSC | T_{B}*; 1xSSC |
| C | DNA:RNA | >50 | 67° C.; 1xSSC -or- | 67° C.; 0.3xSSC |
| | | | 45° C.; 1xSSC, 50% | |
| | | | formamide | |
| D | DNA:RNA | <50 | T_{D}*; 1xSSC | T_{D}*; 1xSSC |
| E | RNA:RNA | >50 | 70° C.; 1xSSC -or- | 70° C.; 0.3xSSC |
| | | | 50° C.; 1xSSC, 50% | |
| | | | formamide | |
| F | RNA:RNA | <50 | T_{F}*; 1xSSC | T_{f}*; 1xSSC |
| G | DNA:DNA | >50 | 65° C.; 4xSSC -or- | 65° C.; 1xSSC |
| | | | 42° C.; 4xSSC, 50% | |
| | | | formamide | |
| H | DNA:DNA | <50 | T_{H}*; 4xSSC | T_{H}*; 4xSSC |
| I | DNA:RNA | >50 | 67° C.; 4xSSC -or- | 67° C.; 1xSSC |
| | | | 45° C.; 4xSSC, 50% | |
| | | | formamide | |
| J | DNA:RNA | <50 | T_{J}*; 4xSSC | T_{J}*; 4xSSC |
| K | RNA:RNA | >50 | 70° C.; 4xSSC -or- | 67° C.; 1xSSC |
| | | | 50° C.; 4xSSC, 50% | |
| | | | formamide | |
| L | RNA:RNA | <50 | T_{L}*; 2xSSC | T_{L}*; 2xSSC |
| ¹The hybrid length is that anticipated for the hybridized region(s) of the hybridizing polynucleotides. When hybridizing a polynucleotide to a target polynucleotide of unknown sequence, the hybrid length is assumed to be that of the hybridizing polynucleotide. When polynucleotides of known sequence are hybridized, the hybrid length can be determined by aligning the sequences of the polynucleotides and identifying the region or regions of optimal sequence complementarity. | | | | |
| ^{H}SSPE (1x SSPE is 0.15M NaCl, 10 mM NaH₂PO₄, and 1.25 mM EDTA, pH 7.4) can be substituted for SSC (1x SSC is 0.15M NaCl and 15 mM sodium citrate) in the hybridization and wash buffers. | | | | |
| T_{B}* − T_{R}*: The hybridization temperature for hybrids anticipated to be less than 50 base pairs in length should be 5-10° C. less than the melting temperature (Tₘ) of the hybrid, where Tₘ is determined according to the following equations. For hybrids less than 18 base pairs in length, Tₘ(° C.) = 2(# of A + T bases) + 4(# of G + C bases). For hybrids between 18 and 49 base pairs in length, | | | | |
| #Tₘ(° C.) = 81.5 + 16.6(log₁₀[Na⁺]) + 0.41(% G + C) − (600/N), where N is the number of bases in the hybrid, and [Na⁺] is the molar concentration of sodium ions in the hybridization buffer ([Na⁺] for 1x SSC = 0.165 M). | | | | |

[0106] Generally, and as stated above, the isolated polynucleotides of the present invention may also be used as hybridization probes and primers to identify and isolate DNAs homologous to the disclosed polynucleotides. These homologs are polynucleotides isolated from different species than those of the disclosed polynucleotides, or within the same species, but with significant sequence similarity to the disclosed polynucleotides. Preferably, polynucleotide homologs have at least 60% sequence identity (more preferably, at least 75% identity; most preferably, at least 90% identity) with the disclosed polynucleotides. Preferably, homologs of the disclosed polynucleotides are those isolated from mammalian species.

[0107] The isolated polynucleotides of the present invention may also be used as hybridization probes and primers to identify cells and tissues that express the polynucleotides of the present invention and the conditions under which they are expressed.

[0108] The present invention also contemplates recombinantly express the proteins or polypeptides encoded by the novel CHO sequences. A number of cell types may act as suitable host cells for recombinant expression of the polypeptides encoded by the novel CHO sequences of the invention. Mammalian host cells include, but are not limited to, e.g., COS cells, CHO cells, 293 cells, A431 cells, 3T3 cells, CV-1 cells, HeLa cells, L cells, BHK21 cells, HL-60 cells, U937 cells, HEK cells, PerC6 cells, Jurkat cells, normal diploid cells, cell strains derived from in vitro culture of primary tissue, and primary explants.

[0109] Alternatively, it may be possible to recombinantly produce the polypeptides encoded by the novel CHO sequences of the present invention in lower eukaryotes such as yeast or in prokaryotes. Potentially suitable yeast strains include Saccharomyces cerevisiae, Schizosaccharomyces pombe, Kluyveromyces strains, and Candida strains. Potentially suitable bacterial strains include Escherichia coli, Bacillus subtilis, and Salmonella typhimurium. If the polypeptides are made in yeast or bacteria, it may be necessary to modify them by, e.g., phosphorylation or glycosylation of appropriate sites, in order to obtain functionality. Such covalent attachments may be accomplished using well-known chemical or enzymatic methods.

[0110] The polypeptides encoded by polynucleotides of the present invention may also be recombinantly produced by operably linking the isolated novel CHO sequences of the present invention to suitable control sequences in one or more insect expression vectors, such as baculovirus vectors, and employing an insect cell expression system. Materials and methods for baculovirus/Sf9 expression systems are commercially available in kit form (e.g., the MaxBac® kit, Invitrogen, Carlsbad, Calif.).

[0111] Following recombinant expression in the appropriate host cells, the polypeptides encoded by polynucleotides of the present invention may then be purified from culture medium or cell extracts using known purification processes, such as gel filtration and ion exchange chromatography. Purification may also include affinity chromatography with agents known to bind the polypeptides encoded by the polynucleotides of the present invention. These purification processes may also be used to purify the polypeptides from natural sources.

[0112] Alternatively, the polypeptides encoded by the novel CHO sequences of the present invention may also be recombinantly expressed in a form that facilitates purification. For example, the polypeptides may be expressed as fusions with proteins such as maltose-binding protein (MBP), glutathione-S-transferase (GST), or thioredoxin (TRX). Kits for expression and purification of such fusion proteins are commercially available from New England BioLabs (Beverly, Mass.), Pharmacia (Piscataway, N.J.), and Invitrogen (Carlsbad, Calif.), respectively. The polypeptides encoded by polynucleotides of the present invention can also be tagged with a small epitope and subsequently identified or purified using a specific antibody to the epitope. A preferred epitope is the FLAG epitope, which is commercially available from Eastman Kodak (New Haven, Conn.).

[0113] The polypeptides encoded by the novel CHO sequences of the present invention may also be produced by known conventional chemical synthesis. Methods for chemically synthesizing the polypeptides encoded by the novel CHO sequences of the present invention are well known to those skilled in the art. Such chemically synthetic polypeptides may possess biological properties in common with the natural, purified polypeptides, and thus may be employed as biologically active or immunological substitutes for the natural polypeptides.

[0114] It should be understood that the above-described embodiments and the following examples are given by way of illustration, not limitation. Various changes and modifications within the scope of the present invention will become apparent to those skilled in the art from the present description.

### EXAMPLES

### Example 1

### Cell culture

[0115] Cells were cultured in serum-free suspension culture in two basic formats, under two basic conditions. One format was small scale, shake flask culture in which cells were cultured in less than 100 ml in a vented tissue culture flask, rotated on an orbiting shaker in a CO₂ incubator. The second format was in bench top bioreactors, 2L or less working volume, controlled for pH, nutrients, dissolved oxygen, and temperature. The two basic culture conditions were ordinary passage conditions of 37C, or fed batch culture conditions. In a basic fed batch culture, the cells are grown for a longer period of time, and shifted to a lower temperature in order to prolong cell viability and extend to the productive phase of the culture.

### Example 2

### Classification of CHO Cell Cultures

[0116] CHO cell lines were categorized based on each of the following phenotypes useful for highly productive fed-batch cell culture processes: high cell growth rate, high peak cell density, sustained high cell viability, high maximum cellular productivity, sustained high cellular productivity, low ammonium production, and low lactate production. A cell sample matrix was generated in which the phenotypic categories were populated with the appropriate CHO cell samples taken from shake flask and benchtop bioreactor cultures and included 375 individual samples (including biological triplicates or quadruplicates) and 29 different rCHO lines expressing monoclonal antibodies, cytokines, coagulation factors and Fc:receptor fusion molecules. An exemplary portion of the cell sample matrix is depicted in FIG. 2, in which the abbreviation Qp is used for cellular productivity. An exemplary phenotypic comparison between test cell lines and control cell lines for the “high cell growth rate” phenotype is depicted in FIG. 3.

### Example 3

### Detection of Differentially Expressed Proteins

Method

[0117] Cells were harvested and subjected to standard lysis in 7 M urea, 2 M thiourea, 4% CHAPS, 30 mM Tris, 5 mM magnesium acetate at pH 8.5. 150 μg aliquots of the lysates were analyzed by two-dimensional gel electrophoresis to confirm sample quality using 18 cm immobilized pH gradient isoelectric focusing gradient strips, pH 4-7. The strips were rehydrated overnight with 340 μl of buffer per strip. Samples were loaded at the cathodic end of the strip and subjected to 500 V for 1 hour, 1000 V for 1 hour, and 8000 V for 4 hours and stored at −80° C. until the second dimension on 12.5% acrylamide gels. Electrophoresis in the second dimension was performed at 1.5 W per gel for 30 minutes and then a total of 100 W for 5 hours for a Dalt 6 run of 6 large format gels. Proteins were visualized by silver staining to confirm the quality of the proteins in the lysate.

[0118] Aliquots of the original lysates were then labeled with fluorescent dyes in preparation for fluorescent 2-dimensional differential in-gel electrophoresis (DIGE), an overview of which is shown in FIG. 4. Each comparison of cell cultures was performed four times using duplicate gels for a total of 8 DIGE gels per experiment, using 50 μg each of Cy2-, Cy3-, and Cy5-labeled cell lysates per gel. All cell lysates used in an experiment were pooled and labeled with Cy2 to serve as an internal standard. The control cell lysate was labeled with Cy3 and the test cell lysate is labeled with Cy5. Labeling was performed on ice in the dark for 30 minutes, followed by a 10 minute quenching of the reaction using 10 mM lysine on ice in the dark. The Cy2-, Cy3-, and Cy5-labeled lysates were then pooled and mixed with 2× sample buffer for 15 minutes in the dark on ice.

[0119] The samples were applied to immobilized pH gradient isoelectric focusing strips. The strips were rehydrated overnight for about 20 hours. Samples were loaded at the cathodic end of the strip and subjected to 300V/3 hr/G, 600V/3 hr/S&H, 1000V/3 hr/G, 8000V/3 hr/G, 8000V/4 hr/S&H, and 500V/12 hr/S&H. One hour before SDS-PAGE, the strips were subjected to 8000V for one hour. The strips were equilibrated for 15 minutes in SDS buffer+1% DTT and for 15 minutes in SDS buffer+2.5% iodoacetamide. The strips were applied to polyacrylamide gels and overlaid with agarose. Electrophoresis through the gels was performed at 1.5 W/gel at 10° C. for about 18 hours on a Dalt 12 using 12 large format gels. The gels were scanned on a Typhoon™ 9400 scanner with a variable mode imager; cropped; and imported into DeCyder™ software. Differentially regulated proteins were identified using biological variance analysis (BVA). These proteins were matched to a preparative gel loaded with 400 μg of protein and stained with ruthenium. From the preparative gel, an Ettan Spot Picker was used to pick proteins identified by DIGE as differentially regulated. An Ettan Digestor was used to digest the individual proteins with an overnight trypsin incubation. The resulting peptides were analyzed by mass spectrometry. MALDI is used, particularly for highly abundant samples on gels, for peptide mass fingerprinting.

[0120] For lower abundance samples, LC-MS/MS using an MDLC LTQ machine is used. Tryptically digested samples from 2D gel spots were resuspended in 20 μL of LC-MS grade water containing 0.1% TFA and analysed by one-dimensional LC-MS using the Ettan™ MDLC system (GE Healthcare) in high-throughput configuration directly connected to a Finnigan™ LTQ™ (Thermo Electron). Samples were concentrated and desalted on RPC trap columns (Zorbax™ 300SB C18, 0.3 mm×5 mm, Agilent Technologies) and the peptides were separated on a nano-RPC column (Zorbax™ 300SB C18, 0.075 mm×100 mm, Agilent Technologies) using a linear acetonitrile gradient from 0-65% Acetonitrile (Riedel-de Haën LC-MS grade) over 60 minutes directly into the LTQ via a 10 μm nanoESI emitter (Presearch FS360-20-10-CE-20). The LTQ ion trap mass spectrometer was used for MS/MS. A scan time of ˜0.15 s (one microscans with a maximum ion injection time of 10 ms) over an m/z range of 300-2000 was used followed by MS/MS analysis of the 3 most abundant peaks from each scan which were then excluded for the next 60 seconds followed by MS/MS of the next three abundant peaks which in turn were excluded for 60 seconds and so on. A “collision energy” setting of 35% was applied for ion fragmentation and dynamic exclusion was used to discriminate against previously analysed ions (data dependent analysis).

[0121] All buffers used for nanoLC separations contained 0.1% Formic Acid (Fluka) as the ion pairing reagent. Full scan mass spectra were recorded in profile mode and tandem mass spectra in centroid mode. The peptides were identified using the information in the tandem mass spectra by searching against SWISS PROT database using SEQUEST™. An Xcorr value of >1.5 for singly charged peptides, >2.0 for doubly charged peptide and >2.5 for triply charged peptides was used as statistical cut-off.

Markers for Maximum Cellular Productivity

[0122] The protein expression profile of four cultures of a cell line overexpressing PACE (furin preproprotein), having a high maximum cellular productivity, was compared to the protein expression profile of four cultures of a control cell line. Approximately 2000 proteins were matched across all 8 gel experiments (involving a total of 24 images). To be considered as a differentially-expressed protein in the DeCyder analysis, a protein must have been identified in all 24; have demonstrated at least a 1.5-fold up- or down-regulation; and have demonstrated a T-test score less than 0.05. 188 proteins were identified as differentially regulated, most with highly significant T-test scores, including several low abundance proteins. FIG. 5 depicts the Cy3 and Cy5 staining patterns on an exemplary gel. A protein that appears to be 5-fold upregulated in the Cy5-labeled test cell extract is outlined in the Figure; graphical depictions of the relative abundance of the protein in the Cy5-labeled test cell extract are also shown. A protein that appears to be 4-fold downregulated in the Cy5-labeled test cell extract is outlined in FIG. 6 and graphical depictions analogous to those in the previous Figure are shown.

[0123] Tables 2 and 3 list several of the spots identified as differentially expressed in the high maximal cellular productivity cell line. For each of the spots listed in the tables, MALDI sequence analysis identified one or two corresponding amino acid sequences. The tables provide, for each spot number, the fold difference in protein levels between the test and control samples, labeled as “Average Ratio”; proteins whose levels are reduced in the test samples are indicated with a negative sign. The tables also provide the p-value that the differences in expression would be the result of random chance and the protein name and accession number corresponding to any identified amino acid sequence. In the MALDI sequence analysis, the molecular weights of the trypsin fragments were compared to predicted molecular weights of trypsin fragments of known sequences. In some cases, in this sequence analysis and in other peptide sequence analyses included in this application, the detected molecular weights are indicative of detection of a modified form of a peptide, such as where cysteine has been modified with iodacetamide, or where methionine has been partially oxidized. It is understood that this is not necessarily reflective of the initial state of the peptide in the context of the protein in the cell or the cellular milieu. Accordingly, the peptide sequences provided in the sequence listing reflect the unmodified forms of the peptide, and cells engineered to have desirable cellular phenotypes will, in some embodiments, be engineered to regulate genes expressing an amino acid sequence comprising one or more of the peptides.

[0124] In the tables, “% coverage” refers to the percentage of the total length of a database sequence for which corresponding trypsin fragments were detected in the experiment. pI and M_{R} refer to the apparent isoelectric point and apparent molecular weight of the protein spot. For some proteins, putative protein functions are also provided in the table.

TABLE 2
High Max Qp Prot Proteins Identified as Novel Homologs of Non-Hamster Proteins

| | AverageRatio | | | | | | | | |
|---|---|---|---|---|---|---|---|---|---|
| Spot no. | (Test/Control) | p-value | gi accession no. | Protein name | % coverage | pI | Mr | Function | Species |
| 912 | 1.9 | 3.2 × 10−12 | gi\|49645 | Protein disulfide-isomerase A6 | 18.2 | 5 | 48.54 | Catalyzes the re-arrangement of S—S | Mesocricetus |
| | | | and gi\|62296810 | precursor (Protein disulfide isomerase | | | | bonds in proteins/protein folding | auratus and Rattus |
| | | | | P5) (Calcium-binding protein 1) | | | | | norvegicus |
| | | | | (CaBP1) | | | | | |
| 105 | −1.87 | 1.4 × 10−6 | gi\|14250200 | vinculin | 11.4 | 5.8 | 117.3 | | Mus musculus |
| 114 | 1.59 | 5.9 × 10−5 | gi\|24025637 | heat shock protein 4 | 11.9 | 5.1 | 94.84 | protein folding | Rattus norvegicus |
| 310 | 1.63 | 1.1 × 10−9 | gi\|51948378 | minichromosome maintenance protein 7 | 13.9 | 5.9 | 81.67 | | Rattus norvegicus |
| 326 | 8.28 | 2 × 10−12 | gi\|4505579 | furin preproprotein (PACE) | 7.9 | 6 | 87.92 | Endoprotease/precursor | Homo sapiens |
| | | | | | | | | processing activity (release of | |
| | | | | | | | | mature proteins from pro-proteins) | |
| 381 | 1.5 | 8.90E−09 | gi\|31981237 | thimet oligopeptidase 1 | 18.6 | 5.7 | 78.81 | | Mus musculus |
| 467 | −1.55 | 1.00E−09 | gi\|31981769 | glycerol phosphate dehydrogenase 2, | 8.8 | 6.3 | 81.48 | | Mus musculus |
| | | | | mitochondrial | | | | | |
| 585 | −1.97 | 7.7 × 10−10 | gi\|1915913 | Ulip2 protein | 23.8 | 6 | 62.55 | | Mus musculus |
| 627 | 1.58 | 5.8 × 10−9 | gi\|40018616 | chaperonin containing TCP1, subunit 3 (gamma) | 18 | 6.2 | 61.2 | Protein folding | Rattus norvegicus |
| 662 | −3.66 | 3.6 × 10−15 | gi\|34853001 | PREDICTED: similar to UDP-N- | 14.8 | 5.4 | 57.16 | | Rattus norvegicus |
| | | | | acteylglucosamine pyrophosphorylase | | | | | |
| | | | | 1-like 1 | | | | | |
| 759 | −1.77 | 1.4 × 10−9 | gi\|52353955 | 3-phosphoglycerate dehydrogenase | 14.8 | 6.1 | 57.37 | | Mus musculus |
| 831 | −1.55 | 7.2 × 10−8 | gi\|1708472 | Inosine-5′-monophosphate | 17.5 | 6.3 | 55.62 | | Mus musculus |
| | | | | dehydrogenase 1 (IMP dehydrogenase | | | | | |
| | | | | 1) (IMPDH-I) (IMPD 1) | | | | | |
| 899 | 1.58 | 4.4 × 10−6 | gi\|53237082 | eukaryotic translation initiation factor 3, subunit 5 (epsilon) | 15.2 | 5.2 | 38.09 | Translation initiation | Mus musculus |
| 968 | 1.62 | 6 × 10−9 | gi\|14010837 | NSFL1 (p97) cofactor (p47) | 42.7 | 5 | 40.66 | | Rattus norvegicus |
| 1082 | −2.5 | 6.9 × 10−13 | gi\|12842724 | unnamed protein product | 16 | 7.7 | 44.45 | | Mus musculus |
| 1126 | 1.52 | 0.00012 | gi\|62296810 | Protein disulfide-isomerase A6 | 12.1 | 5 | 48.54 | Catalyses the re-arrangement of S—S | Rattus norvegicus |
| | | | | precursor (Protein disulfide isomerase | | | | bonds in proteins/protein folding | |
| | | | | P5) (Calcium-binding protein 1) | | | | | |
| | | | | (CaBP1) | | | | | |
| 1129 | −2.12 | 3.1 × 10−13 | gi\|62296810 | Capg protein | 20.6 | 6.5 | 39.04 | Caps actin filaments/intermediate | Rattus norvegicus |
| | | | | | | | | filament assembly | |
| 1159 | 1.61 | 1.5 × 10−6 | gi\|21312564 | calponin 3, acidic | 29.8 | 5.7 | 36.51 | | Mus musculus |
| 1221 | 1.59 | 7.4 × 10−5 | gi\|54114937 | Eno1 protein (enolase) | 15.3 | 7.8 | 50.18 | | Mus musculus |
| 1265 | 1.66 | 2.6 × 10−6 | gi\|34870516 | PREDICTED: similar to RIKEN cDNA | 24 | 5.2 | 35.04 | | Rattus norvegicus |
| 1274 | 1.72 | 1.8 × 10−3 | gi\|3041728 | 60S acidic ribosomal protein P0 (L10E) | 29.8 | 5.7 | 36.51 | | Bos taurus |
| 1295 | 1.57 | 1.5 × 10−11 | gi\|51262090 | Eef1d protein (eukaryotic translation | 24.2 | 4.9 | 31.39 | Protein translation | Mus musculus |
| | | | | elongation factor 1-delta) | | | | | |
| 1326 | −1.73 | 2.8 × 10−10 | gi\|47169319 | Chain D, Structure Of Pitp-Alpha | 17.8 | 6.1 | 30.97 | | Homo sapiens |
| | | | | Complexed To Phosphatidylinositol | | | | | |
| 1341 | −1.51 | 8.0 × 10−10 | gi\|15100179 | malate dehydrogenase (soluble) | 31.5 | 7.7 | 38.91 | | Rattus norvegicus |
| 1352 | 1.55 | 4.5 × 10−12 | gi\|10442752 | eukaryotic translation elongation factor | 21.4 | 4.9 | 31.39 | Protein translation | Mus musculus |
| | | | | 1-delta | | | | | |
| 1359 | 1.59 | 2 × 10−15 | gi\|10442752 | eukaryotic translation elongation factor | 29.5 | 4.9 | 31.39 | Protein translation | Mus musculus |
| | | | | 1-delta | | | | | |
| 1412 | −1.62 | 3.3 × 10−11 | gi\|388923 | purine-nucleoside phosphorylase | 23.9 | 6.5 | 32.57 | | Mus spretus |
| 1426 | 1.78 | 1.1 × 10−3 | gi\|73968592 | PREDICTED: similar to cyclin- | 38.1 | 6.3 | 27.56 | | Canis familiaris |
| | | | | dependent kinase 4 isoform 3 | | | | | |
| 1454 | 1.73 | 3.6 × 10−10 | gi\|18044897 | Tyms protein (thymidylate synthase) | 19.2 | 5.9 | 35.2 | | Mus musculus |
| 1525 | 2.1 | 2.1 × 10−12 | gi\|13928824 | tyrosine 3-monooxygenase/tryptophan | 39.2 | 4.6 | 29.34 | | Rattus norvegicus |
| | | | | 5-monooxygenase activation protein | | | | | |
| 1525 | 2.1 | 2.1 × 10−12 | gi\|73961101 | Tropomyosin | 41.9 | 4.7 | 26.63 | | Canis familiaris |
| 1577 | 1.53 | 8 × 10−11 | gi\|53733577 | Rho GDP dissociation inhibitor (GDI) | 33.3 | 5.1 | 23.45 | Signal transduction/cell motility/ | Rattus norvegicus |
| | | | and | alpha | | | | cytoskeletal activity | and Mus musculus |
| | | | gi\|31982030 | | | | | | |
| 1678 | 3.48 | 6.2 × 10−12 | gi\|14010865 | heat shock 27 kDa protein | 35.1 | 6.1 | 22.86 | Chaperone | Rattus norvegicus |
| 1685 | 3.74 | 5.3 × 10−14 | gi\|14010865 | heat shock 27 kDa protein | 26.8 | 6.1 | 22.86 | Chaperone | Rattus norvegicus |
| 1724 | −3.46 | 4.1 × 10−18 | gi\|34879492 | similar to Translationally controlled | 13.9 | 5.2 | 19.09 | | Rattus norvegicus |
| | | | | tumor protein (TCTP) (p23) (21 kDa | | | | | |
| | | | | polypeptide) (p21) (Lens epithelial | | | | | |
| | | | | protein) | | | | | |
| 1814 | −1.72 | 2.3 × 10−10 | gi\|817935 | adenine phophoribosyltransferase | 38.3 | 5.7 | 19.61 | | Cricetulus |
| | | | | | | | | | longicaudatus |
| 2000 | −1.8 | 1.3 × 10−8 | gi\|1083180 | galectin-1 | 37.8 | 5.5 | 15.13 | Unknown function in CHO, may be | Cricetulus griseus |
| | | | | | | | | involved in cell proliferation. In | |
| | | | | | | | | humans, may have role in | |
| | | | | | | | | apoptosis & cell differentiation | |
| 108 | 1.67 | 2.90E−06 | gi\|62087882 | heat shock 70 kDa protein 4 isoform a | 9.7 | 0 | 5.4 | | Homo sapiens |
| 123 | 1.53 | 0.0011 | gi\|26522952 | alanyl trna synthetase | 17.8 | 0 | 5.3 | | Mesocricetus |
| | | | | | | | | | auratus |
| 256 | −1.87 | 1.70E−07 | gi\|56605726 | eukaryotic translation initiation factor | 13.6 | 0.01 | 5.6 | Translation initiation | Rattus norvegicus |
| | | | | 4B | | | | | |
| 434 | −1.51 | 0.0057 | gi\|42542422 | Heat shock protein 8 | 21.5 | 0 | 5.3 | | Mus musculus |
| 724 | 2.38 | 8.40E−12 | gi\|13097417 | FK506 binding protein 4 | 25.8 | 0.002 | 5.6 | | Mus musculus |
| 1171 | 1.51 | 0.0011 | gi\|56206424 | nucleophosmin 1 | 20.6 | 0.001 | 4.5 | | Mus musculus |
| 1330 | −2.02 | 5.60E−07 | gi\|14249130\| | LIM and SH3 protein 1 (lasp-1) | 39.9 | 0 | 6.6 | | Rattus norvegicus |
| 1358 | −1.52 | 1.30E−09 | gi\|7710036 | heterogeneous nuclear | 21.3 | 0 | 6.9 | | Mus musculus |
| | | | | ribonucleoprotein D-like | | | | | |
| 1459 | −1.51 | 8.10E−09 | gi\|59858367 | annexin 5 | 20.6 | 0.001 | 4.9 | | Bos taurus |
| 1486 | 1.7 | 2.80E−10 | gi\|77377292 | sulfatase modifying factor 2 | 23.4 | 0.006 | 6.6 | | Mus musculus |
| 1532 | −2.19 | 6.70E−09 | gi\|73961099 | PREDICTED: similar to tropomyosin 3 | 29.4 | 0.001 | 4.7 | Intermediate filament | Canis familiaris |
| | | | | isoform 2 isoform 17 | | | | | |
| 1629 | −1.54 | 1.20E−10 | gi\|62647453 | PREDICTED: similar to ribose 5- | 21.5 | 0.001 | 7.9 | | Rattus norvegicus |
| | | | | phosphate isomerase | | | | | |
| 1780 | −1.6 | 9.30E−10 | gi\|32452351 | CAP1 protein | 32.3 | 0.007 | 6.3 | | Mesocricetus |
| | | | | | | | | | auratus |
| 1906 | −1.51 | 3.30E−07 | gi\|14625464 | stathmin | 53.7 | 0 | 5.9 | | Mus musculus |
| 2098 | −2.01 | 6.00E−14 | gi\|51854249 | S100 calcium binding protein A11 | 21.4 | 0 | 5.6 | | Rattus norvegicus |
| | | | | (calizzarin) | | | | | |
| 2130 | −2.61 | 4.20E−12 | gi\|198561 | EGF-binding protein | 19.6 | 0 | 6.9 | | Mus musculus |

[0125] TABLE 3
High Max Qp Prot Known Hamster Proteins

| | Average | | | | % | | | | |
|---|---|---|---|---|---|---|---|---|---|
| | Ratio | | | | cov- | | | | |
| Spot | (Test/ | | gi accession | | er- | | | | |
| no. | Control) | p-value | no. | Protein name | age | pI | Mr | Function | Species |
| 426 | −2 | 3.6 × 10−7 | gi\31981722 | heat shock 70 kDa protein 5 (glucose- | 32.1 | 5.1 | 72.53 | Protein complex | Cricetulus griseus |
| | | | or | regulated protein) or dnaK-type molecular | | | | assembly in ER? | |
| | | | gi\|90188 | chaperone GRP78 precursor - Chinese | | | | | |
| | | | | hamster | | | | | |
| 452 | −1.73 | 3.6 × 10−11 | gi\|3122170 | Stress-70 protein, mitochondrial precursor | 15.8 | 5.9 | 74 | Chaperone | Cricetulus griseus |
| | | | and | (75 kDa glucose regulated protein) (GRP | | | | | |
| | | | gi\|2231704 | 75)/70 kDa heat shock protein precursor | | | | | |
| 719 | 3.54 | 7.6 × 10−14 | gi\|123332 | Hydroxymethylglutaryl-CoA synthase, | 11.5 | 5.4 | 57.93 | Cholesterol | Cricetulus griseus |
| | | | | cytoplasmic (HMG-CoA synthase) (3- | | | | biosynthesis | |
| | | | | hydroxy-3-methylglutaryl coenzyme A | | | | | |
| | | | | synthase) | | | | | |
| 729 | 2.78 | 1.6 × 10−16 | gi\|123332 | Hydroxymethylglutaryl-CoA synthase, | 15.8 | 5.4 | 57.93 | Cholesterol | Cricetulus griseus |
| | | | | cytoplasmic (HMG-CoA synthase) (3- | | | | biosynthesis | |
| | | | | hydroxy-3-methylglutaryl coenzyme A | | | | | |
| | | | | synthase) | | | | | |
| 745 | −1.59 | 3.6 × 10−8 | gi\|860908 | vimentin | 41.6 | 4.7 | 44.62 | Intermediate filament | Cricetulus griseus |
| 750 | −1.75 | 2.7 × 10−7 | gi\|860908 | vimentin | 51.6 | 4.7 | 44.62 | Intermediate filament | Cricetulus griseus |
| 778 | −1.65 | 1 × 10−9 | gi\|860908 | vimentin | 26.6 | 4.7 | 44.62 | Intermediate filament | Cricetulus griseus |
| 867 | −2.33 | 4.6 × 10−9 | gi\|860908 | vimentin | 26.6 | 4.7 | 44.62 | Intermediate filament | Cricetulus griseus |
| 947 | −2.02 | 7.2 × 10−7 | gi\|860908 | vimentin | 45.5 | 4.7 | 44.62 | Intermediate filament | Cricetulus griseus |
| 1308 | −2.38 | 2.70E−14 | gi\|2114406 | aldo-keto reductase | 23.7 | 6.2 | 36.61 | | Cricetulus gnseus |

[0126] Sequence data for identified proteins are provided in FIGS. 7 through 59. Each figure provides, for a particular protein spot from the DIGE, the spectrum of molecular weights detected in the tryptic digest; the corresponding protein database match or matches, including the number of peptides matched to the predicted tryptic peptides for the protein database entry, the accession number, name, and species of the protein from the database entry, the percent coverage, the isoelectric point and mass; for each molecular weight matched with a predicted mass of a predicted peptide, the measured mass, the predicted (compared) mass, the difference between the two, and the corresponding peptide sequence; and the full length sequence of the protein from the database entry.

Markers for High Cell Growth Rate

[0127] The protein expression profile of PA DUKX 378, having a high cell growth rate, was compared to the protein expression profile of PA DUKX 153.8. Tables 4 and 5 list several of the spots identified as differentially expressed in the high maximal cellular productivity cell line. For each of the spots listed in the tables, MALDI sequence analysis identified matches to a corresponding amino acid sequence from Chinese hamsters or from another species. The tables provide, for each spot number, the fold difference in protein levels between the test and control samples, labeled as “Average Ratio”; proteins whose levels are reduced in the test samples are indicated with a negative sign. The tables also provide: the p-value (statistical significance); and the protein name, accession number, and species corresponding to any identified amino acid sequence.

TABLE 4
High Cell Growth Rate Proteins Identified as Novel Homologs of Non-Hamster Proteins

| | | | | | | | | | | No. |
|---|---|---|---|---|---|---|---|---|---|---|
| | Average | | | | | | | | | peptides |
| Decyder | Ratio | | | | | | | | Expectancy | used for |
| Master | (Test/ | | | | Mass Spec | % | | | value - | LC-MS/ |
| no. | Control) | p-value | Accession no. | Protein name | Identification | coverage | pI | Mr | MALDI | MS ID |
| 310 | 1.67 | 5.1 × 10−5 | gi\|17865351 | valosin-containing protein | MALDI ID | 30.3 | 5.1 | 90.02 | 0 | |
| 314 | −1.6 | 3.8 × 10−4 | gi\|600159 | elongation factor 2 | MALDI ID | 23.1 | 6.4 | 96.26 | 0 | |
| 440 | 1.64 | 0.0024 | gi\|38371758 | alpha glucosidase II alpha | MALDI ID | 12.3 | 5.9 | 86.27 | 0 | |
| | | | | subunit isoform 1 | | | | | | |
| 610 | 2.18 | 1.5 × 10−5 | gi\|21411235 | NADH dehydrogenase | MALDI ID | 23.2 | 5.8 | 80.45 | 0 | |
| | | | | (ubiquinone) Fe—S protein 1, | | | | | | |
| | | | | 75 kDa, precursor | | | | | | |
| 624 | 1.54 | 2.7 × 10−4 | gi\|73968066 | PREDICTED: similar to 78 kDa | MALDI ID | 30.3 | 5.1 | 65.46 | 0 | |
| | | | | glucose-regulated protein | | | | | | |
| | | | | precursor (GRP 78) | | | | | | |
| | | | | (Immunoglobulin heavy chain | | | | | | |
| | | | | binding protein) (BiP) | | | | | | |
| | | | | (Endoplasmic reticulum | | | | | | |
| | | | | lumenal Ca(2+) binding | | | | | | |
| | | | | protein grp78) isoform 3 | | | | | | |
| 636 | 1.56 | 3.5 × 10−6 | gi\|73968066 | PREDICTED: similar to 78 kDa | MALDI ID | 26.3 | 5.1 | 65.46 | | |
| | | | | glucose-regulated protein | | | | | | |
| | | | | precursor (GRP 78) | | | | | | |
| | | | | (Immunoglobulin heavy chain | | | | | | |
| | | | | binding protein) (BiP) | | | | | | |
| | | | | (Endoplasmic reticulum | | | | | | |
| | | | | lumenal Ca(2+) binding | | | | | | |
| | | | | protein grp78) isoform 3 | | | | | | |
| 703 | 1.65 | 9.5 × 10−4 | gi\|42542422 | heat shock 70 kDa protein 8 | MALDI ID | 34.8 | 5.3 | 71.08 | 0 | |
| | | | | (Hsc70-ps1) | | | | | | |
| 708 | 1.52 | 0.0035 | gi\|5685 | heat shock 70 kDa protein 8 | MALDI ID | 37.8 | | | 0 | |
| | | | | (Hsc70-ps1) | | | | | | |
| 894 | 1.56 | 0.0016 | gi\|24025637 | heat shock 70 kDa protein 4 | MALDI ID | 9.6 | 5.1 | 94.84 | 0.001 | |
| 990 | 1.61 | 2.7 × 10−10 | gi\|2745838 | Hsp70/Hsp90 organizing | MALDI ID | 27.8 | 6.4 | 63.26 | 0 | |
| | | | | protein | | | | | | |
| 1033 | 1.63 | 2.7 × 10−7 | gi\|16508150 | ERP57 protein (glucose | MALDI ID | 25.7 | 6 | 57.23 | 0 | |
| | | | | regulated protein/protein | | | | | | |
| | | | | disulphide isomerase) | | | | | | |
| 1139 | 1.59 | 3.8 × 10−6 | gi\|52353955 | 3-phosphoglycerate | MALDI ID | 16.9 | 6.1 | 57.37 | 0 | |
| | | | | dehydrogenase | | | | | | |
| 1172 | −1.67 | 3.2 × 10−5 | gi\|73993723 | PREDICTED: similar to | MALDI ID | 19.1 | 5.7 | 53.46 | 0.001 | |
| | | | | Serine/threonine protein | | | | | | |
| | | | | phosphatase 2A, 55 kDa | | | | | | |
| | | | | regulatory subunit B, alpha | | | | | | |
| | | | | isoform (PP2A, subunit B, B- | | | | | | |
| | | | | alpha isoform) (PP2A, subunit | | | | | | |
| | | | | B, B55-alpha isoform) (PP2A, | | | | | | |
| | | | | subunit B, PR55-alpha | | | | | | |
| | | | | isoform) (PP2A, subunit B, | | | | | | |
| | | | | R2-alpha isoform)... isoform 9 | | | | | | |
| 1284 | 1.77 | 0.003 | gi\|21618633 | 3-hydroxy-3-methylglutaryl- | MALDI ID | 21 | 5.6 | 58.16 | 0 | |
| | | | | Coenzyme A synthase 1 | | | | | | |
| 1452 | 1.54 | 0.012 | gi\|51710798 | PREDICTED: similar to | MALDI ID | 8.3 | 4.7 | 50.28 | 0.001 | |
| | | | | tubulin, beta, 2 | | | | | | |
| 1541 | −1.68 | 3.2 × 10−9 | gi\|381964 | actin-related protein | MALDI ID | 39.6 | 6.3 | 42.67 | 0 | |
| 1806 | 1.52 | 2.9 × 10−4 | gi\|433308\| | capping protein alpha | MALDI ID | 20.4 | 5.6 | 32.96 | 0.002 | |
| 1880 | −1.62 | 2.2 × 10−4 | gi\|18026574 | transaldolase | MALDI ID | 25.8 | 7 | 37.54 | 0 | |
| 1959 | −2.23 | 5.3 × 10−8 | gi\|18026574 | transaldolase | MALDI ID | 40.4 | 7 | 37.54 | 0 | |
| 2326 | −1.69 | 6.80E−11 | gi\|73962540 | PREDICTED: similar to | MALDI ID | 30.1 | 5.5 | 27.5 | 0 | |
| | | | | Proteasome activator complex | | | | | | |
| | | | | subunit 2 (Proteasome | | | | | | |
| | | | | activator 28-beta subunit) | | | | | | |
| | | | | (PA28beta) (PA28b) | | | | | | |
| | | | | (Activator of multicatalytic | | | | | | |
| | | | | protease subunit 2) (11S | | | | | | |
| | | | | regulator complex beta | | | | | | |
| | | | | subunit) (REG-beta) isoform 1 | | | | | | |
| 2445 | −1.88 | 1.7 × 10−6 | gi\|61862114 | PREDICTED: similar to SET | MALDI ID | 32.1 | 4.1 | 29.5 | 0.001 | |
| | | | | protein (Phosphatase 2A | | | | | | |
| | | | | inhibitor I2PP2A) (I-2PP2A) | | | | | | |
| | | | | (Template activating factor I) | | | | | | |
| | | | | (TAF-I) (Liver regeneration | | | | | | |
| | | | | related protein LRRGR00002) | | | | | | |
| | | | | (Ab1-115), partial/(SET beta | | | | | | |
| | | | | isoform) | | | | | | |
| 2564 | 1.65 | 2.4 × 10−7 | gi\|14010865 | heat shock 27 kDa protein 1 | MALDI ID | 34.1 | 6.1 | 22.86 | 0 | |
| 2733 | 1.52 | 7.1 × 10−9 | gi\|13386316 | actin related protein M2 | MALDI ID | 12.7 | 5 | 42.05 | 0.002 | |
| 3495 | 1.5 | 1.90E−06 | gi\|6755911\| | Thioredoxin 1 | LC-MS/MS ID | 31.43 | 4.8 | 11.68 | | 3 |
| | | | gi\|549078\| | | | | | | | |
| | | | sp\|P10639\| | | | | | | | |
| 3498 | 1.5 | 5.10E−05 | gi\|12230575\| | SH3 domain-binding glutamic | LC-MS/MS ID | 34.21 | 4.87 | 12.81 | | 4 |
| | | | sp\|O75368\| | acid-rich-like protein | | | | | | |

[0128] TABLE 5
High Cell Growth Rate Known Hamster Proteins

| | Average Ratio | | | | |
|---|---|---|---|---|---|
| Spot no. | (Test/Control) | p-value | gi accession no. | Protein name | Species |
| 314 | −1.6 | 3.8 × 10−4 | gi\|600159 | elongation factor 2 | Cricetulus |
| | | | | | griseus |
| 990 | 1.61 | 2.7 × 10−10 | gi\|2745838 | Hsp70/Hsp90 organizing protein | Cricetulus |
| | | | | | griseus |
| 1033 | 1.63 | 2.7 × 10−7 | gi\|16508150 | ERP57 protein (glucose regulated protein/ | Cricetulus |
| | | | | protein disulphide isomerase) | griseus |
| 1880 | −1.62 | 2.2 × 10−4 | gi\|18026574 | transaldolase | Cricetulus |
| | | | | | griseus |
| 1959 | −2.23 | 5.3 × 10−8 | gi\|18026574 | transaldolase | Cricetulus |
| | | | | | griseus |

[0129] TABLE 6
HCGR3 List

| | Average | | | | | % | | | | |
|---|---|---|---|---|---|---|---|---|---|---|
| | Ratio | | | | | cov- | | | Expectancy | No. peptides |
| Spot | (Test/ | | | | Mass Spec | er- | | | value - | used for LC- |
| no. | Control) | p-value | Accession no. | Protein name | Identification | age | pI | Mr | MALDI | MS/MS ID |
| 428 | 3.57 | 1.70E−08 | gi\|600159 | elongation factor 2 | MALDI ID | 29.8 | 6.4 | 96.26 | 0 | |
| 447 | 3.67 | 4.10E−08 | gi\|600159 | elongation factor 2 | MALDI ID | 28.3 | 6.4 | 96.26 | 0 | |
| 705 | 1.84 | 3.6 × 10−15 | gi\|21704020 | NADH dehydrogenase | MALDI ID | 17.2 | 5.5 | 80.76 | 0 | |
| | | | | (ubiquinone) Fe—S protein 1 | | | | | | |
| 716 | 2.32 | 5.90E−06 | gi\|73968066 | PREDICTED: similar to 78 kDa | MALDI ID | 30 | 5.1 | 65.46 | 0 | |
| | | | | glucose-regulated | | | | | | |
| | | | | protein precursor (GRP 78) | | | | | | |
| | | | | (Immunoglobulin heavy | | | | | | |
| | | | | chain binding protein) | | | | | | |
| | | | | (BiP) (Endoplasmic | | | | | | |
| | | | | reticulum lumenal Ca(2+) | | | | | | |
| | | | | binding protein grp78) | | | | | | |
| | | | | isoform 3 | | | | | | |
| 730 | 1.76 | 0.024 | gi\|73968066 | PREDICTED: similar to 78 kDa | MALDI ID | 26.1 | 5.1 | 65.46 | 0 | |
| | | | | glucose-regulated | | | | | | |
| | | | | protein precursor (GRP 78) | | | | | | |
| | | | | (Immunoglobulin heavy | | | | | | |
| | | | | chain binding protein) | | | | | | |
| | | | | (BiP) (Endoplasmic | | | | | | |
| | | | | reticulum lumenal Ca(2+) | | | | | | |
| | | | | binding protein grp78) | | | | | | |
| | | | | isoform 3 | | | | | | |
| 797 | −1.87 | 5.8 × 10−15 | gi\|1339938 | glycerol-3-phosphate | MALDI ID | 14.3 | 6.2 | 81.49 | 0.002 | |
| | | | | dehydrogenase | | | | | | |
| 999 | −1.58 | 1.6 × 10−14 | gi\|34785817 | Copine I | MALDI ID | 10.6 | 5.4 | 59.59 | 0.003 | |
| 1017 | −1.7 | 1.8 × 10−15 | gi\|34853001 | similar to UDP-N- | MALDI ID | 11.6 | 5.4 | 57.16 | 0.005 | |
| | | | | acteylglucosamine | | | | | | |
| | | | | pyrophosphorylase 1-like 1 | | | | | | |
| 1039 | 1.61 | 7.50E−15 | gi\|31981679 | heat shock protein 1 | MALDI ID | 41.2 | 5.7 | 61.11 | 0 | |
| | | | | (chaperonin) | | | | | | |
| 1069 | −1.64 | 3.1 × 10−9 | gi\|27762594 | alpha tubulin | MALDI ID | 21.6 | 4.9 | 50.69 | 0 | |
| 1137 | 1.58 | 9.9 × 10−14 | gi\|22324680 | FK506 binding protein 4 | MALDI ID | 31.3 | 5.7 | 45.87 | 0.001 | |
| 1180 | 1.54 | 3.9 × 10−14 | gi\|48675860 | eukaryotic translation | MALDI ID | 13.1 | 6.5 | 51.1 | 0.005 | |
| | | | | initiation factor 2B, subunit | | | | | | |
| | | | | 3 gamma | | | | | | |
| 1263 | 1.61 | 3.4 × 10−11 | gi\|3121992 | Aldehyde dehydrogenase, | MALDI ID | 37 | 5.8 | 54.83 | 0 | |
| | | | | mitochondrial (ALDH | | | | | | |
| | | | | class 2) (ALDH1) (ALDH- | | | | | | |
| | | | | E2) | | | | | | |
| 1303 | −1.62 | 1.3 × 10−13 | gi\|25742757 | glutathione synthetase | MALDI ID | 16.2 | 5.5 | 52.61 | 0 | |
| 1336 | −1.64 | 3 × 10−10 | gi\|62296810 | Protein disulfide-isomerase | MALDI ID | 15.2 | 5 | 48.55 | 0 | |
| | | | | A6 precursor (Protein | | | | | | |
| | | | | disulfide isomerase P5) | | | | | | |
| | | | | (Calcium-binding protein | | | | | | |
| | | | | 1) (CaBP1) | | | | | | |
| 1344 | 1.9 | 4.9 × 10−15 | gi\|48146175 | EIF3S6 (eukaryotic | MALDI ID | 30.8 | 5.7 | 52.59 | 0 | |
| | | | | initiation factor 3, subunit | | | | | | |
| | | | | 6) | | | | | | |
| 1376 | 1.92 | 1.7 × 10−12 | gi\|74007151 | PREDICTED: similar to | MALDI ID | 32.3 | 9.4 | 44.26 | 0.009 | |
| | | | | Alpha enolase (2-phospho- | | | | | | |
| | | | | D-glycerate hydro-lyase) | | | | | | |
| | | | | (Non-neural enolase) | | | | | | |
| | | | | (NNE) (Enolase 1) | | | | | | |
| | | | | (Phosphopyruvate | | | | | | |
| | | | | hydratase) (C-myc | | | | | | |
| | | | | promoter-binding protein) | | | | | | |
| | | | | (MBP-1) (MPB-1) | | | | | | |
| | | | | (Plasminogen-binding | | | | | | |
| | | | | protein) | | | | | | |
| 1393 | 1.54 | 9.6 × 10−12 | gi\|74007151 | PREDICTED: similar to | MALDI ID | 32.5 | 9.4 | 44.26 | 0 | |
| | | | | Alpha enolase (2-phospho- | | | | | | |
| | | | | D-glycerate hydro-lyase) | | | | | | |
| | | | | (Non-neural enolase) | | | | | | |
| | | | | (NNE) (Enolase 1) | | | | | | |
| | | | | (Phosphopyruvate | | | | | | |
| | | | | hydratase) (C-myc | | | | | | |
| | | | | promoter-binding protein) | | | | | | |
| | | | | (MBP-1) (MPB-1) | | | | | | |
| | | | | (Plasminogen-binding | | | | | | |
| | | | | protein) | | | | | | |
| 1403 | −1.54 | 1.70E−09 | gi\|73979721 | PREDICTED: similar to | MALDI ID | 20.6 | 5.3 | 45.73 | 0.003 | |
| | | | | Ribonucleoside- | | | | | | |
| | | | | diphosphate reductase M2 | | | | | | |
| | | | | chain (Ribonucleotide | | | | | | |
| | | | | reductase small chain) | | | | | | |
| | | | | isoform 1 | | | | | | |
| 1438 | −1.6 | 1.3 × 10−10 | gi\|38197664 | Adhesion regulating | MALDI ID | 15 | 4.9 | 42.43 | 0.004 | |
| | | | | molecule 1 | | | | | | |
| 1470 | −1.82 | 1.00E−10 | gi\|70909332 | hypoxia-inducible factor 1, | MALDI ID | 14.9 | 5.6 | 40.39 | 0.008 | |
| | | | | alpha subunit inhibitor | | | | | | |
| 1526 | −1.59 | 8.9 × 10−16 | gi\|1351867 | Actin, cytoplasmic 1 (Beta- | MALDI ID | 34.9 | 5.2 | 42.06 | 0 | |
| | | | sp\|P48975\| | actin) | | | | | | |
| 1706 | −1.82 | 3.10E−13 | gi\|16758446 | isocitrate dehydrogenase 3 | MALDI ID | 24 | 6.5 | 40.05 | 0.001 | |
| | | | | (NAD+) alpha | | | | | | |
| 1738 | −1.61 | 1.3 × 10−15 | gi\|73951310 | PREDICTED: similar to | MALDI ID | 33.2 | 5.9 | 35.1 | 0.008 | |
| | | | | isocitrate dehydrogenase 3 | | | | | | |
| | | | | (NAD+) alpha isoform 2 | | | | | | |
| 1774 | −1.7 | 6.7 × 10−16 | gi\|2114406 | aldo-keto reductase | MALDI ID | 23.1 | 6.2 | 36.61 | 0.002 | |
| 1815 | −1.51 | 1.2 × 10−8 | gi\|1407651 | Lasp-1 | MALDI ID | 41 | 5.1 | 23.08 | 0 | |
| 1916 | −1.68 | 1.6 × 10−15 | gi\|17391477 | Annexin 5 | MALDI ID | 38.8 | 4.9 | 35.96 | 0 | |
| 2328 | −1.67 | 0 | gi\|17939632 | Platelet-activating factor | MALDI ID | 17.5 | 5.6 | 25.72 | 0.003 | |
| | | | | acetylhydrolase, isoform | | | | | | |
| | | | | Ib, beta subunit 30 kDa | | | | | | |
| 2353 | −1.6 | 4.8 × 10−10 | gi\|68085578 | Tyrosine 3/tryptophan 5 - | MALDI ID | 44.5 | 4.7 | 27.87 | 0 | |
| | | | | monooxygenase activation | | | | | | |
| | | | | protein, zeta polypeptide | | | | | | |
| 2371 | 1.55 | 6 × 10−12 | gi\|17389815 | Triosephosphate isomerase 1 | MALDI ID | 22.1 | 6.4 | 26.91 | 0.001 | |
| 3034 | −1.69 | 3.70E−11 | gi\|124231\| | Eukaryotic translation | LC-MS/MS ID | 20.13 | 5.07 | 16.82 | | 4 |
| | | | sp\|P10160\| | initiation factor 5A (eIF- | | | | | | |
| | | | | 5A) (eIF-4D) | | | | | | |
| 3050 | 1.58 | 1.50E−09 | gi\|9910216 AND | Prefoldin subunit 5 | LC-MS/MS ID | 16.49 | 6.83 | 21.64 | | 3 |
| | | | gi\|73921733\| | | | | | | | |
| | | | sp\|Q5RAY0\| | | | | | | | |
| 3244 | 1.79 | 2.5 × 10−14 | gi\|14625464 | stathmin | MALDI ID | 36.9 | 5.9 | 17.2 | 0.007 | 3 |
| 3892 | 1.56 | 8.30E−10 | gi\|2842685\| | Myotrophin (V-1 protein) | LC-MS/MS ID | 18.64 | 5.11 | 12.87 | | 2 |
| | | | sp\|Q91955 | (Granule cell | | | | | | |
| | | | | differentiation protein) | | | | | | |

Statistics used in Decyder analysis, +/−1.5 fold change, t-test < 0.05

[0130] Sequence data for identified proteins are provided in FIGS. 60 through 112. Each figure provides, for a particular protein spot from the DIGE, the spectrum of molecular weights detected in the tryptic digest; the corresponding protein database match or matches, including the number of peptides matched to the predicted tryptic peptides for the protein database entry, the accession number, name, and species of the protein from the database entry, the percent coverage, the isoelectric point and mass; for each molecular weight matched with a predicted mass of a predicted peptide, the measured mass, the predicted (compared) mass, the difference between the two, and the corresponding peptide sequence; and the full length sequence of the protein from the database entry.

### Example 4

### Proteins Differentially Expressed in Cells with Sustained High Cell Viability or High Peak Cell Density

[0131] Table 7 lists several of the spots identified as differentially expressed in the cells with sustained high cell viability using methods as described in Example 3. Sequence data for the identified proteins are provided in FIGS. 113 through 127. Table 8 lists several of the spots identified as differentially expressed in the cells with high peak cell density using similar methods; corresponding sequence data are shown in FIGS. 128 through 138. The tables provide, for each spot number, the fold difference in protein levels between the test and control samples, labeled as “Average Ratio”; proteins whose levels are reduced in the test samples are indicated with a negative sign. The tables also provide the p-value that the differences in expression would be the result of random chance and the protein name and accession number corresponding to any identified amino acid sequence. The resulting peptides were analyzed by mass spectrometry. MALDI is used, particularly for highly abundant samples on gels, for peptide mass fingerprinting. For lower abundance samples, LC-MS/MS using an MDLC LTQ machine is used. In the MALDI sequence analysis, the molecular weights of the trypsin fragments were compared to predicted molecular weights of trypsin fragments of known sequences. In the tables, “% coverage” refers to the percentage of the total length of a database sequence for which corresponding trypsin fragments were detected in the experiment. pI and M_{R} refer to the apparent isoelectric point and apparent molecular weight of the protein spot.

TABLE 7
Differentially expressed proteins in cells with sustained high cell viability
(Statistics used in Decyder analysis, +/−1.5 fold change, t-test < 0.05)

| | | | | | | | | | | No. |
|---|---|---|---|---|---|---|---|---|---|---|
| | | | | | | | | | | peptides |
| | Average | | | | | | | | | used for |
| | Ratio | | | | | | | | Expectancy | LC- |
| Spot | (Test/ | | | | Mass Spec | | | | value - | MS/MS |
| no. | Control) | p-value | Accession no. | Protein name | Identification | % coverage | pI | Mr | MALDI | ID |
| 539 | 1.93 | 1.90E−05 | gi\|38969850 | Chaperonin containing TCP1, | MALDI ID | 30.3 | 6.2 | 61.2 | 0 | |
| | | | | subunit 3 (gamma) | | | | | | |
| 559 | −1.53 | 0.03 | gi\|15030102 | Sdha protein (succinate | MALDI ID | 23.1 | 7.2 | 73.39 | 0 | |
| | | | | dehydrogenase) | | | | | | |
| 800 | 2.89 | 2.90E−10 | gi\|21618633 | 3-hydroxy-3 methylglutaryl- | MALDI ID | 13.3 | 5.6 | 58.16 | 0.005 | |
| | | | | Coenzyme A synthase 1 | | | | | | |
| 870 | −1.84 | 0.014 | gi\|23272966\| | Atp5b protein | MALDI ID | 21.4 | 5.2 | 56.65 | 0 | |
| 915 | −1.54 | 0.04 | gi\|3121992\| | Aldehyde dehydrogenase, | MALDI ID | 35.6 | 5.8 | 54.83 | 0 | |
| | | | sp\|P81178\| | mitochondrial (ALDH class 2) | | | | | | |
| 1393 | −1.61 | 0.0082 | gi\|18026574 | transaldolase | MALDI ID | 29.4 | 7 | 37.54 | 0 | |
| | | | gi\|46396972\| | | | | | | | |
| | | | sp\|Q8VI73\| | | | | | | | |
| 2022 | 1.53 | 0.00054 | gi\|47496673 | GRP2 (Growth factor receptor- | MALDI ID | 52.5 | 6.1 | 25.24 | 0 | |
| | | | | bound protein 2) | | | | | | |
| 2050 | −1.58 | 0.023 | gi\|34879492 | PREDICTED: similar to tumor | MALDI ID | 18.2 | 5.2 | 19.09 | 0.009 | |
| | | | | protein, translationally- | | | | | | |
| | | | | controlled 1 | | | | | | |
| 2250 | −1.63 | 0.01 | gi\|1313936 | mitochondrial ribosomal protein | MALDI ID | 22.7 | 9.4 | 21.69 | 0.005 | |
| 2459 | 2.08 | 0.0021 | gi\|3212116 | prefoldin subunit 2 | MALDI ID | 40.9 | 6.8 | 16.82 | 0 | |
| 2543 | 1.72 | 2.80E−05 | gi\|14625464 | stathmin | MALDI ID | 53.7 | 5.9 | 17.2 | 0 | |
| 2863 | 1.72 | 0.013 | gi\|9963901 | profilin II | MALDI ID | 29.5 | 6.6 | 16.05 | 0 | |
| 2897 | 1.77 | 0.0013 | gi\|73961217 | PREDICTED: similar to ATP | MALDI ID | 31.4 | 6.1 | 12.82 | 0.003 | |
| | | | | synthase alpha chain, | | | | | | |
| | | | | mitochondrial precursor | | | | | | |
| | | | | isoform 3 | | | | | | |
| 3340 | −7.54 | 7.90E−13 | gi\|2493416\| | S100 calcium-binding protein | LC-MS/MS ID | 17.35 | 5.9 | 11.47 | | 2 |
| | | | sp\|Q99584 | A13 | | | | | | |
| 3349 | −1.55 | 0.00011 | gi\|50401358\| | Calpactin I light chain (S100 | LC-MS/MS ID | 20.62 | 6.82 | 11.2 | | 2 |
| | | | sp\|P62504\| | calcium-binding protein A10) | | | | | | |

[0132] TABLE 8
HCD3 Protein List
All test samples vs all control samples (day 3, 5, 7), (Filters - 1.2 fold up/down regulation,
t-test < 0.01, 2-way anova < 0.01, Decyder statistical analysis)

| | Fold | | | | | | | | No. |
|---|---|---|---|---|---|---|---|---|---|
| | Change | | | | | | | | peptides |
| | (All | | | | | | | Expectancy | used for |
| Spot | Test/All | Accession | | Mass Spec | % | | | value - | LC-MS/MS |
| no. | Control) | number | Protein Name | Identification | coverage | pI | Mr | MALDI | ID |
| 619 | −1.34 | gi\|20532062\| | Dipeptidyl-peptidase 3 | LC-MS/MS ID | 8.4 | 5.22 | 82.29 | | 7 |
| | | sp\|Q99KK7\| | (Dipeptidyl-peptidase III) | | | | | | |
| 984 | 1.2 | gi\|75773247\| | Chaperonin subunit 6a | MALDI ID | 20.3 | 6.6 | 58.46 | 0.007 | |
| | | | (zeta) | | | | | | |
| 1078 | 1.2 | gi\|179102\| | aspartyl-tRNA synthetase | MALDI ID | 16.4 | 6.2 | 57.57 | 0.005 | |
| 1148 | −1.23 | gi\|135446\| | Tubulin beta-1 chain | LC-MS/MS ID | 6.52 | 4.78 | 49.91 | | 3 |
| | | sp\|P09203\| | (Beta-tubulin class-I) | | | | | | |
| 1154 | −1.25 | gi\|1353212\| | Vimentin | LC-MS/MS ID | 4.69 | 4.94 | 51.85 | | 2 |
| | | sp\|P48670\| | | | | | | | |
| 1157 | 1.3 | gi\|62511005\| | D-3-phosphoglycerate | LC-MS/MS ID | 10.88 | 6.48 | 56.55 | | 5 |
| | | sp\|Q60HD7\| | dehydrogenase | | | | | | |
| 1373 | −1.24 | gi\|729443\| | Protein disulfide- | LC-MS/MS ID | 20.73 | 5.04 | 48.16 | | 8 |
| | | sp\|P38660\| | isomerase A6 precursor | | | | | | |
| 1382 | −1.24 | gi\|729443\| | Protein disulfide- | LC-MS/MS ID | | 5.04 | 48.16 | | |
| | | sp\|P38660\| | isomerase A6 precursor | | | | | | |
| 1500 | −1.23 | gi\|548710\|sp\|Q05186\| | Reticulocalbin-1 | LC-MS/MS ID | 15.08 | 4.7 | 38.11 | | 7 |
| | | | precursor | | | | | | |
| 1656 | 1.24 | gi\|729023\| | Macrophage capping | LC-MS/MS ID | 23.86 | 6.73 | 39.24 | | 6 |
| | | sp\|P24452 | protein (Myc basic motif | | | | | | |
| | | | homolog 1) | | | | | | |
| 1682 | 1.32 | gi\|21466051 | Chain A, Crystal | MALDI ID | 20.9 | 6.1 | 34.95 | 0 | |
| | | | Structure Of The | | | | | | |
| | | | Mitochondrial Serine | | | | | | |
| | | | Protease Htra2 | | | | | | |
| 2324 | −1.31 | gi\|61227509\| | Latexin (Endogenous | LC-MS/MS ID | 14.8 | 5.77 | 25.58 | | 3 |
| | | sp\|Q64361\| | carboxypeptidase | | | | | | |
| | | | inhibitor) | | | | | | |

### Example 5

### mRNA Expression Profiling

[0133] RNA samples from test and control CHO cell lines were obtained and analyzed on a microchip containing probes for CHO mRNA sequences as described in U.S. Patent Application Publication US2006/0010513, the complete contents of which are herein incorporated by reference. The hybridization cocktail was spiked with a fragmented cRNA standard to generate a standard curve using labeled, fragmented cRNA of control sequences at known concentrations, permitting normalization of the data and assessment of chip sensitivity and saturation. The scan data were quality controlled using the 3′/5′ ratio of β-actin and GAPDH, the signal intensity and consistency, and the percent present. Generally, data normalization was performed using software tools Affy 5.0 and Genesis 2.0; or dChiP (see Li et al. (2001) Proc. Natl. Acad. Sci. USA 98:31-36 and Li et al. (2001) Genome Biol. 2:0032.1-0032.11) and Genespring. A P_{Value} less than or equal to 0.05 and a fold-change minimum between the test and control lines of 1.2 was required before a gene would be further considered. An unsupervised Pearson Clustering Analysis is depicted in FIGS. 139 and 140.

[0134] An exemplary method of data analysis is depicted in FIG. 141. Pairs of test and control cell lines for the high cell growth rate were compared and mRNA expression patterns meeting the 1.2-fold difference requirement were identified. Of those, the 65 genes that were differentially expressed in each of four different pairs of test and control cell lines were identified. Of the 65, 29 were either consistently up-regulated or consistently down-regulated in the test cell lines; these were given a higher priority for further analysis.

[0135] An exemplary method of data analysis that does not rely on pairwise differences is depicted in FIG. 142. 590 genes were identified whose average expression levels in the high cell growth rate test CHO cell lines as a group were at least 1.2-fold higher than the average expression in the group of control CHO cell lines. When a 1.5-fold difference in expression was required and additional, more stringent statistical analysis was applied, 78 genes passed the criteria; these were given a higher priority for further analysis.

### Example 6

### Genes Differentially Expressed in Cells with High Maximum Cellular Productivity

[0136] A summary of nucleic acids identified as differentially expressed in cells with high maximum cellular productivity is provided in Tables 9 and 10. For each nucleic acid, a qualifier name, symbol, and title are provided, as well as whether the nucleic acid is up-regulated or down-regulated in the cells with higher maximum cellular productivity. For nucleic acids with human or mouse homologs in the Unigene database, the table provides Unigene ID numbers and statistics relating to the comparison, including e-values, percent sequence identities between the CHO sequence and the Unigene databank entries, and percent coverage (“% QC”).

[0137] Nucleic acids encoding proteins associated with the endoplasmic reticulum (ER) or the Golgi complex may contribute to cellular productivity, particularly for the production of a secreted protein. Table 11 summarizes nucleic acids that are differentially expressed by a factor of at least 1.2 in cells overexpressing PACE and encode an ER-associated protein. Table 12 summarizes nucleic acids that are differentially expressed by a factor of at least 1.2 in cells overexpressing PACE and encode a Golgi-associated protein.

TABLE 9
High Max Qp NA Unknown CHO Sequences

| | | | Human | | |
|---|---|---|---|---|---|
| Qualifier List | Symbol | Title | Unigene ID | eValue | % ID |
| WAN0088NU_at | LMNA | Lamin A/C | Hs.491359 | 3E−23 | 85.7143 |
| (SEQ ID NO: 1478) | | | | | |
| WAN0088OT_at | NA | WAN0088OT 10595D-F11 | #N/A | | |
| (SEQ ID NO: 1479) | | | | | |
| WAN0088PY_at | DDX5 | DEAD (Asp-Glu_Ala-Asp) box | Hs.416922 | 0.001 | 91.6667 |
| (SEQ ID NO: 1480) | | polypeptide 5 | | | |
| WAN0088T3_at | ANXA1 | Annexin A1 | Hs.494173 | 6E−76 | 87.372 |
| (SEQ ID NO: 1481) | | | | | |
| WAN0088ZP_at | PAWR | PRKC, apoptosis, WT1, regulator | Hs.406074 | 4E−10 | 91.5254 |
| (SEQ ID NO: 1482) | | | | | |
| WAN00895Y_f_at | DQ390542.2 | Mitochondrial cytochrome b | #N/A | | |
| (SEQ ID NO: 1483) | | | | | |
| WAN008C42_at | CD36 | CD36 antigen | Hs.120949 | 1.00E−05 | 90.9091 |
| (SEQ ID NO: 1484) | | | | | |
| WAN008CJ1_at | ERP70 | Protein disulfide isomerase- | Hs.93659 | 1E−120 | 89.6277 |
| (SEQ ID NO: 1485) | | associated 4 | | | |
| WAN008DT7_at | GSTO1 | Glutathione S-transferase omega 1 | Hs.190028 | 5E−65 | 83.9437 |
| (SEQ ID NO: 1486) | | | | | |
| WAN008EA0_at | VCP | Valosin-containing protein | Hs.529782 | 0 | 90.7273 |
| (SEQ ID NO: 1487) | | | | | |
| WAN008F1I_at | SHOC2 | Soc-2 suppressor of clear homolog | Hs.104315 | 2E−18 | 85.0575 |
| (SEQ ID NO: 1488) | | (C. elegans) | | | |
| WAN008F2S_at | NA | WAN008F2S 11165A-F02 | #N/A | | |
| (SEQ ID NO: 1489) | | | | | |
| WAN013HX8_x_at | EIF4A2 | Eukaryotic translation initiation | Hs.478553 | 0 | 90.824 |
| (SEQ ID NO: 1490) | | factor 4A, isoform 2 | | | |
| WAN013HXR_x_at | STAT6 | signal transducer and activator of | #N/A | | |
| (SEQ ID NO: 1491) | | transcription 6 | | | |
| WAN013I1P_at | HNRPA2B1 | Heterogeneous nuclear | Hs.487774 | 0 | 97.2222 |
| (SEQ ID NO: 1492) | | ribonucleoprotein A2/B1 | | | |
| WAN013I1T_x_at | DQ390542.2 | Mitochondrial NADH | #N/A | | |
| (SEQ ID NO: 1493) | | dehydrogenase subunit 2 | | | |
| WAN013I66_f_at | Vim | Vimentin (Vim), mRNA | Hs.533317 | 1E−126 | 92.2559 |
| (SEQ ID NO: 1494) | | | | | |
| WAN013IA0_at | HPRT1 | hypoxanthine | Hs.412707 | 2.00E−66 | 83.0986 |
| (SEQ ID NO: 1495) | | phosphoribosyltransferase 1 | | | |
| | | (Lesch-Nylan syndrome) | | | |
| WAN013IAB_x_at | TP53 | Tumor protein p53 (Li-Fraumeni | Hs.408312 | 1E−150 | 82.4477 |
| (SEQ ID NO: 1496) | | syndrome) | | | |

| | | Mouse | | | | |
|---|---|---|---|---|---|---|
| Qualifier List | % QC | Unigene ID | eValue | % ID | % QC | |
| WAN0088NU_at | 23.0503 | Mm.243014 | 0 | 92.04947 | 98.0936 | down |
| (SEQ ID NO: 1478) | | | | | | |
| WAN0088OT_at | | #N/A | | | | down |
| (SEQ ID NO: 1479) | | | | | | |
| WAN0088PY_at | 6.2069 | Mm.220038 | 3.00E−16 | 93.05556 | 12.4138 | down |
| (SEQ ID NO: 1480) | | | | | | |
| WAN0088T3_at | 71.1165 | Mm.248360 | 1E−114 | 92.13115 | 74.0291 | down |
| (SEQ ID NO: 1481) | | | | | | |
| WAN0088ZP_at | 11.1111 | Mm.336104 | 9E−53 | 91.62562 | 38.2298 | up |
| (SEQ ID NO: 1482) | | | | | | |
| WAN00895Y_f_at | | Mm.369891 | 0.001 | 91.42857 | 19.5531 | down |
| (SEQ ID NO: 1483) | | | | | | |
| WAN008C42_at | 3.05132 | Mm.18628 | 7.00E−19 | 85.71429 | 9.2233 | down |
| (SEQ ID NO: 1484) | | | | | | |
| WAN008CJ1_at | 81.9172 | Mm.2442 | 1E−170 | 94.57364 | 84.3137 | up |
| (SEQ ID NO: 1485) | | | | | | |
| WAN008DT7_at | 60.8919 | Mm.378931 | 1E−102 | 87.27273 | 66.0377 | down |
| (SEQ ID NO: 1486) | | | | | | |
| WAN008EA0_at | 99.6377 | Mm.379457 | 0 | 95.47101 | 100 | up |
| (SEQ ID NO: 1487) | | | | | | |
| WAN008F1I_at | 31.0714 | Mm.228669 | 1E−36 | 90.37037 | 24.1071 | down |
| (SEQ ID NO: 1488) | | | | | | |
| WAN008F2S_at | | #N/A | | | | down |
| (SEQ ID NO: 1489) | | | | | | |
| WAN013HX8_x_at | 98.3425 | Mm.260084 | 0 | 92.50936 | 98.3425 | up |
| (SEQ ID NO: 1490) | | | | | | |
| WAN013HXR_x_at | | Mm.336898 | 2.00E−19 | 89.62264 | 7.89278 | down |
| (SEQ ID NO: 1491) | | | | | | |
| WAN013I1P_at | 90.9474 | Mm.155896 | 0 | 96.52778 | 90.9474 | down |
| (SEQ ID NO: 1492) | | | | | | |
| WAN013I1T_x_at | | #N/A | | | | down |
| (SEQ ID NO: 1493) | | | | | | |
| WAN013I66_f_at | 57.6699 | Mm.268000 | 1E−131 | 91.84953 | 61.9417 | down |
| (SEQ ID NO: 1494) | | | | | | |
| WAN013IA0_at | 17.6727 | Mm.299381 | 4.00E−70 | 83.10811 | 18.4194 | down |
| (SEQ ID NO: 1495) | | | | | | |
| WAN013IAB_x_at | 48.8592 | #N/A | 1E−133 | 81.32045 | 48.8592 | down |
| (SEQ ID NO: 1496) | | | | | | |

[0138] TABLE 10
High Max Qp NA Known CHO Sequences

| | | | | | | | | | | | Direction of |
|---|---|---|---|---|---|---|---|---|---|---|---|
| | | | Human | | | | Mouse | | | | change (test vs |
| Qualifier List | Symbol | Title | Unigene ID | eValue | % ID | % QC | Unigene ID | eValue | % ID | % QC | control) |
| AF325501_at | LY96 | Lymphocyte | Hs.69328 | 2E−17 | 79.2727 | 74.3243 | Mm.116844 | 1E−78 | 85.20548 | 98.6486 | down |
| (SEQ ID | | antigen 96 | | | | | | | | | |
| NO: 1497) | | | | | | | | | | | |
| D45419_at | Hcfc1 | Host cell factor | Hs.83634 | 1E−22 | 84.8649 | 32.7434 | Mm.248353 | 1E−123 | 85.99291 | 99.823 | down |
| (SEQ ID | | C1 | | | | | | | | | |
| NO: 1498) | | | | | | | | | | | |
| K00924_at | VIM | Vimentin | Hs.533317 | 5E−44 | 92.9134 | 56.4444 | Mm.268000 | 3E−47 | 94.35484 | 55.1111 | down |
| (SEQ ID | | | | | | | | | | | |
| NO: 1499) | | | | | | | | | | | |
| L00176_at | HMGCR | 3-hydroxy-3- | Hs.11899 | 6E−54 | 87.9808 | 57.9387 | Mm.316652 | 4E−82 | 94.47236 | 55.4318 | up |
| (SEQ ID | | methylglutaryl- | | | | | | | | | |
| NO: 1500) | | Coenzyme A | | | | | | | | | |
| | | reductase | | | | | | | | | |
| L18986_at | LAMP1 | Lysosomal- | Hs.494419 | 1E−82 | 96.7136 | 16.2595 | Mm.16716 | 1E−160 | 87.11864 | 45.0382 | down |
| (SEQ ID | | associated | | | | | | | | | |
| NO: 1501) | | membrane | | | | | | | | | |
| | | protein 1 | | | | | | | | | |
| U48852_at | CRELD2 | Cysteine-rich | HS.211282 | 1E−109 | 81.7694 | 55.1367 | Mm.292567 | 0 | 88.79936 | 91.7221 | up |
| (SEQ ID | | with EGF-like | | | | | | | | | |
| NO: 1502) | | domains 2 | | | | | | | | | |

[0139] TABLE 11
CHO Sequences Differentially Expressed in PACE Overexpressing Cells and Encoding
ER-Associated Proteins

| | | | | | | | Mouse | | | | | Direction of |
|---|---|---|---|---|---|---|---|---|---|---|---|---|
| Qualifier List | Symbol | Title | Human Unigene ID | eValue | % ID | % QC | Unigene ID | eValue | % ID | % QC | Fold change | change |
| WAN008DRM_at | EPHX1 | Epoxide hydrolase 1, microsomal | Hs.89649 | 9E−85 | 87.987 | 60.392 | Mm.9075 | 1E−113 | 91.223 | 62.549 | 1.319 | up |
| (SEQ ID NO: 1503) | | (Ephx1) | | | | | | | | | | |
| WAN0088T7_at | Cyp51 | Cytochrome P450, family 51, | Hs.417077 | 1E−132 | 86.879 | 98.051 | Mm.46044 | 1E−152 | 88.515 | 98.441 | 1.297 | up |
| (SEQ ID NO: 1504) | | subfamily A, polypeptide 1 (CYP51A1) | | | | | | | | | | |
| WAN008ELH_at | RPN1 | Ribophorin I | Hs.518244 | 0 | 90.519 | 99.643 | Mm.188544 | 0 | 92.335 | 100.000 | 1.295 | up |
| (SEQ ID NO: 1505) | | | | | | | | | | | | |
| WAN0088K7_x_at | HSPA5 | Heat shock 70 kDa protein 5 (glucose- | | 0 | 0.000 | 0.000 | Mm.330160 | 0.000009 | 100.000 | 6.923 | 3.401 | up |
| (SEQ ID NO: 1506) | | regulated protein, 78 kDa) | | | | | | | | | | |
| L00176_at | HMGCR | 3-hydroxy-3-methylglutaryl-Coenzyme | Hs.11899 | 7E−54 | 87.981 | 57.939 | Mm.316652 | 3E−82 | 94.472 | 55.432 | 2.551 | up |
| (SEQ ID NO: 1500) | | A reductase | | | | | | | | | | |
| L00178_at | HMGCR | 3-hydroxy-3-methylglutaryl-Coenzyme | Hs.11899 | 3E−47 | 90.062 | 42.819 | Mm.316652 | 1E−57 | 93.038 | 42.021 | 2.033 | up |
| (SEQ ID NO: 1507) | | A reductase | | | | | | | | | | |
| L00169_at | HMGCR | 3-hydroxy-3-methylglutaryl-Coenzyme | Hs.11899 | 2E−19 | 89.535 | 33.992 | Mm.316652 | 7E−27 | 94.872 | 30.830 | 2.020 | up |
| (SEQ ID NO: 1508) | | A reductase | | | | | | | | | | |
| L00180_at | HMGCR | 3-hydroxy-3-methylglutary-Coenzyme | Hs.11899 | 5E−35 | 86.310 | 68.016 | Mm.316652 | 1E−49 | 90.244 | 66.397 | 1.988 | up |
| (SEQ ID NO: 1509) | | A reductase | | | | | | | | | | |
| L00181_at | HMGCR | 3-hydroxy-3-methylglutaryl-Coenzyme | Hs.11899 | 1E−37 | 89.781 | 32.697 | Mm.316652 | 3E−52 | 93.617 | 33.652 | 1.976 | up |
| (SEQ ID NO: 1510) | | A reductase | | | | | | | | | | |
| L00171_at | HMGCR | 3-hydroxy-3-methylglutaryl-Coenzyme | Hs.11899 | 5E−36 | 91.525 | 33.908 | Mm.316652 | 5E−41 | 93.220 | 33.908 | 1.934 | up |
| (SEQ ID NO: 1511) | | A reductase | | | | | | | | | | |
| L00170_x_at | HMGCR | 3-hydroxy-3-methylglutaryl-Coenzyme | Hs.11899 | 7E−27 | 89.091 | 70.968 | Mm.316652 | 6E−54 | 94.815 | 87.097 | 1.718 | up |
| (SEQ ID NO: 1512) | | A reductase | | | | | | | | | | |
| L00173_at | HMGCR | 3-hydroxy-3-methylglutaryl-Coenzyme | Hs.11899 | 2E−33 | 85.882 | 30.466 | Mm.316652 | 8E−78 | 89.919 | 44.444 | 1.621 | up |
| (SEQ ID NO: 1513) | | A reductase | | | | | | | | | | |
| L00182_at | HMGCR | 3-hydroxy-3-methylglutaryl-Coenzyme | Hs.11899 | 3E−65 | 94.012 | 48.688 | Mm.316652 | 2E−65 | 94.479 | 47.522 | 1.546 | up |
| (SEQ ID NO: 1514) | | A reductase | | | | | | | | | | |
| AF380341_at | CANX | Calnexin | Hs.567968 | 1E−101 | 93.359 | 67.016 | Mm.248827 | 1E−114 | 95.000 | 68.063 | 3.165 | up |
| (SEQ ID NO: 1515) | | | | | | | | | | | | |
| WAN013I86_x_at | CANX | Calnexin | Hs.567968 | 1E−111 | 86.053 | 97.187 | Mm.248827 | 1E−169 | 92.072 | 100.000 | 1.508 | up |
| (SEQ ID NO: 1516) | | | | | | | | | | | | |
| WAN008ES3_at | CANX | Calnexin | Hs.567968 | 5E−18 | 88.421 | 22.565 | Mm.248827 | 1E−114 | 92.562 | 86.223 | 1.376 | up |
| (SEQ ID NO: 1517) | | | | | | | | | | | | |
| WAN008EHW_at | OPRS1 | Opioid receptor, sigma 1 | Hs.522087 | 1E−141 | 87.776 | 95.777 | Mm.29025 | 1E−163 | 89.349 | 97.313 | 1.618 | up |
| (SEQ ID NO: 1518) | | | | | | | | | | | | |
| X15652_at | NSF | N-ethylmaleimide-sensitive factor | Hs.431279 | 0 | 89.899 | 99.331 | Mm.260117 | 0 | 94.649 | 100.000 | 1.346 | up |
| (SEQ ID NO: 1519) | | | | | | | | | | | | |
| WAN0088XH_at | HERPUD1 | Homocysteine-inducible, endoplasmic | Hs.146393 | 7E−79 | 87.417 | 68.481 | Mm.29151 | 1E−150 | 91.463 | 92.971 | 1.247 | up |
| (SEQ ID NO: 1520) | | reticulum stress-inducible, ubiquitin- | | | | | | | | | | |
| | | like domain member 1 | | | | | | | | | | |
| WAN008EED_at | Sc5d | Sterol-C5-desaturase (fungal ERG3, | Hs.287749 | 2E−42 | 85.446 | 40.727 | Mm.32700 | 1E−98 | 87.705 | 69.981 | 2.387 | up |
| (SEQ ID NO: 1521) | | delta-5-desaturase) homolog (S. cerevisae) | | | | | | | | | | |
| WAN008CT8_at | AP2M1 | Adaptor-related protein complex 2, mu | Hs.518460 | 0 | 94.384 | 80.803 | Mm.18946 | 0 | 95.484 | 81.152 | 1.385 | up |
| (SEQ ID NO: 1522) | | 1 subunit | | | | | | | | | | |
| WAN008CJ1_at | ERP70 | Protein disulfide isomerase- | Hs.93659 | 1E−120 | 89.628 | 81.917 | Mm.2442 | 1E−170 | 94.574 | 84.314 | 2.985 | up |
| (SEQ ID NO: 1485) | | associated 4 | | | | | | | | | | |
| WAN013I5F_at | SIAT8D | ST8 alpha-N-acetyl-neuraminide | Hs.308628 | 0 | 90.621 | 61.296 | Mm.306228 | 0 | 90.673 | 90.283 | 1.370 | up |
| (SEQ ID NO: 1523) | | alpha-2,8-sialyltransferase 4 | | | | | | | | | | |
| WAN0088XZ_at | RTN3 | Reticulon 3 | Hs.473761 | 1E−167 | 91.126 | 83.848 | Mm.246990 | 0 | 92.545 | 99.819 | 1.546 | up |
| (SEQ ID NO: 1524) | | | | | | | | | | | | |
| WAN013I9D_at | HYOU1 | Hypoxia up-regulated 1 | Hs.277704 | 4E−72 | 85.498 | 26.417 | Mm.116721 | 1E−122 | 92.236 | 25.698 | 1.695 | up |
| (SEQ ID NO: 1525) | | | | | | | | | | | | |
| WAN008DUB_at | RDH11 | Retinol dehydrogenase 11 (Rdh11) | Hs.226007 | 1E−77 | 84.840 | 81.385 | Mm.291799 | 3E−89 | 91.373 | 55.195 | 1.414 | up |
| (SEQ ID NO: 1526) | | | | | | | | | | | | |
| WAN008ELW_f_at | Sec13I1 | SEC13-like 1 (S. cerevisiae) | Hs.166924 | 8E−22 | 93.151 | 87.952 | Mm.29296 | 8E−24 | 92.500 | 96.386 | 1.302 | up |
| (SEQ ID NO: 1527) | | | | | | | | | | | | |
| WAN013I30_at | TRA1 | Tumor rejection antigen (gp96) 1 | Hs.192374 | 0 | 90.545 | 100.000 | Mm.87773 | 0 | 93.273 | 100.000 | 2.849 | up |
| (SEQ ID NO: 1528) | | | | | | | | | | | | |
| WAN013HWO_x_at | TRA1 | Tumor rejection antigen (gp96) 1 | Hs.192374 | 6E−51 | 85.106 | 94.000 | Mm.87773 | 2E−66 | 87.805 | 98.400 | 2.092 | up |
| (SEQ ID NO: 1529) | | | | | | | | | | | | |
| WAN0088ZO_x_at | SYNCRIP | Synaptotagmin binding, cytoplasmic | Hs.472056 | 1E−50 | 94.615 | 70.652 | Mm.32874 | 3E−56 | 95.556 | 73.370 | 2.198 | up |
| (SEQ ID NO: 1530) | | RNA interacting protein | | | | | | | | | | |
| WAN00894J_at | ZMPSTE24 | Zinc metallopeptidase (STE24 | Hs.591501 | 1E−146 | 88.727 | 93.922 | Mm.34399 | 0 | 92.277 | 99.020 | 1.484 | up |
| (SEQ ID NO: 1531) | | homolog, yeast) | | | | | | | | | | |
| WAN013I4D_at | TAP2 | Transporter 2, ATP-binding cassette, | Hs.502 | 5E−33 | 83.258 | 46.331 | Mm.14814 | 1E−111 | 88.950 | 75.891 | −1.914 | down |
| (SEQ ID NO: 1532) | | sub-family B (MDR/TAP) | | | | | | | | | | |
| AF323965_at | CYP11A1 | Cytochrome P450, family 11, | Hs.303980 | 1E−175 | 82.511 | 86.034 | Mm.302865 | 0 | 91.004 | 88.349 | −1.492 | down |
| (SEQ ID NO: 1533) | | subfamily A, polypeptide 1 | | | | | | | | | | |
| WAN013HX5_at | MGST1 | Microsomal glutathione S-transferase 1 | Hs.389700 | 3E−28 | 78.987 | 81.950 | Mm.14796 | 1E−152 | 89.394 | 95.851 | −1.483 | down |
| (SEQ ID NO: 1534) | | | | | | | | | | | | |
| AJ298842_at | Dyt1 | Torsin family 1, member A (torsin A) | Hs.534312 | 2E−89 | 87.209 | 58.703 | Mm.154994 | 1E−153 | 94.366 | 60.580 | −1.251 | down |
| (SEQ ID NO: 1535) | | | | | | | | | | | | |
| AF004831_at | SPTLC1 | Serine palmitoyltransferase, long | Hs.90458 | 1E−18 | 88.889 | 6.767 | Mm.240336 | 5E−84 | 89.441 | 24.211 | −2.201 | down |
| (SEQ ID NO: 1536) | | chain base subunit 1 | | | | | | | | | | |
| WAN013I4M_at | ENTPD5 | Ectonucleoside triphosphate | Hs.131555 | 2E−48 | 90.341 | 32.653 | Mm.10211 | 8E−44 | 88.298 | 34.879 | −1.618 | down |
| (SEQ ID NO: 1537) | | diphosphohydrolase 5 | | | | | | | | | | |
| WAN013I65_at | DPAGT1 | Dolichyl-phosphate (UDP-N- | Hs.524081 | 0 | 90.962 | 39.334 | Mm.18353 | 1E−178 | 90.267 | 39.637 | −1.455 | down |
| (SEQ ID NO: 1538) | | acetylglucosamine) N- | | | | | | | | | | |
| | | acetylglucosaminephosphotransferase | | | | | | | | | | |
| | | 1 (GlcNAc-1-P transferase) | | | | | | | | | | |
| WAN0088KG_at | PPGB | Protective protein for beta- | Hs.517076 | 1E−115 | 87.589 | 72.870 | Mm.359633 | 1E−149 | 90.931 | 72.870 | −3.26 | down |
| (SEQ ID NO: 1539) | | galactosidase (galactosialidosis) | | | | | | | | | | |
| WAN0088TG_at | SRP72 | Signal recognition particle 72 kDa | Hs.237825 | 1E−58 | 89.041 | 50.812 | Mm.296976 | 1E−119 | 92.401 | 76.334 | −1.416 | down |
| (SEQ ID NO: 1540) | | | | | | | | | | | | |
| WAN013I39_at | GGA2 | Golgi associated, gamma adaptin ear | Hs.460336 | 7E−30 | 84.454 | 46.667 | Mm.29619 | 1E−147 | 93.333 | 79.412 | −1.474 | down |
| (SEQ ID NO: 1541) | | containing, ARF binding protein 2 | | | | | | | | | | |
| WAN008CUO_at | GGA2 | Golgi associated, gamma adaptin ear | Hs.460336 | 4E−31 | 89.344 | 25.957 | Mm.29619 | 1E−146 | 90.364 | 99.362 | −1.253 | down |
| (SEQ ID NO: 1542) | | containing, ARF binding protein 2 | | | | | | | | | | |

[0140] TABLE 12
CHO Sequences Differentially Expressed in PACE Overexpressing Cells and Encoding
Golgi-Associated Proteins

| | | | Human | | |
|---|---|---|---|---|---|
| | | | Unigene | | |
| Qualifier List | Symbol | Title | ID | eValue | % ID |
| WAN0088ZC_at | PSEN1 | Presenilin 1 (Alzheimer disease 3) | Hs.592324 | 5E−82 | 89.161 |
| (SEQ ID NO: 1543) | | | | | |
| WAN014IYT_at | FURIN | Furin (paired basic amino acid | Hs.513153 | 0 | 99.922 |
| (SEQ ID NO: 1544) | | cleaving enzyme) | | | |
| WAN008CMC_x_at | MAPRE1 | Microtubule-associated protein, | Hs.472437 | 2E−49 | 94.964 |
| (SEQ ID NO: 1545) | | RP/EB family, member 1 | | | |
| WAN008D2C_at | Csnk2a2 | Casein kinase II, alpha 2, polypeptide | Hs.82201 | 1E−141 | 89.293 |
| (SEQ ID NO: 1546) | | (Csnk2a2) | | | |
| WAN008E72_x_at | GDI2 | GDP dissociation inhibitor 2 | Hs.299055 | 6E−25 | 86.139 |
| (SEQ ID NO: 1547) | | | | | |
| WAN013I8H_x_at | APP | Amyloid beta (A4) precursor protein | Hs.434980 | 1E−102 | 84.192 |
| (SEQ ID NO: 1548) | | (protease nexin-II, Alzheimer disease) | | | |
| AF030413_at | APP | Amyloid beta (A4) precursor protein | Hs.434980 | 6E−90 | 93.421 |
| (SEQ ID NO: 1549) | | (protease nexin-II, Alzheimer disease) | | | |
| WAN013I12_at | VDP | Vesicle docking protein p115 | Hs.292689 | 4E−12 | 85.227 |
| (SEQ ID NO: 1550) | | | | | |
| WAN013HUW_at | ARL1 | ADP-ribosylation factor-like 1 | Hs.372616 | 2E−88 | 91.339 |
| (SEQ ID NO: 1551) | | | | | |
| WAN008CLK_at | Rab6 | RAB6, member RAS oncogene family | Hs.503222 | 2E−55 | 88.477 |
| (SEQ ID NO: 1552) | | | | | |
| WAN0088X9_at | RAB34 | RAB34, member RAS oncogene | Hs.301853 | 1E−108 | 89.174 |
| (SEQ ID NO: 1553) | | family | | | |
| WAN013HZH_at | M6PRBP1 | Mannose-6-phosphate receptor | Hs.140452 | 3E−18 | 76.364 |
| (SEQ ID NO: 1554) | | binding protein 1 | | | |

| | | | | | | | Direction |
|---|---|---|---|---|---|---|---|
| | | Mouse | | | | Fold | of |
| Qualifier List | % QC | Unigene ID | eValue | % ID | % QC | change | change |
| WAN0088ZC_at | 86.145 | Mm.998 | 5E−78 | 88.153 | 86.446 | 1.255 | up |
| (SEQ ID NO: 1543) | | | | | | | |
| WAN014IYT_at | 93.193 | Mm.5241 | 0 | 88.701 | 89.718 | 2.500 | up |
| (SEQ ID NO: 1544) | | | | | | | |
| WAN008CMC_x_at | 88.535 | Mm.143877 | 9E−50 | 94.964 | 88.535 | 1.242 | up |
| (SEQ ID NO: 1545) | | | | | | | |
| WAN008D2C_at | 91.497 | Mm.51136 | 0 | 95.158 | 99.261 | 1.272 | up |
| (SEQ ID NO: 1546) | | | | | | | |
| WAN008E72_x_at | 100.000 | Mm.153226 | 1E−74 | 95.545 | 100.000 | −1.455 | down |
| (SEQ ID NO: 1547) | | | | | | | |
| WAN013I8H_x_at | 99.646 | Mm.277585 | 1E−162 | 87.788 | 100.000 | −1.902 | down |
| (SEQ ID NO: 1548) | | | | | | | |
| AF030413_at | 100.000 | Mm.277585 | 2E−97 | 94.737 | 100.000 | −1.851 | down |
| (SEQ ID NO: 1549) | | | | | | | |
| WAN013I12_at | 15.385 | Mm.15868 | 9E−42 | 85.259 | 43.881 | −1.588 | down |
| (SEQ ID NO: 1550) | | | | | | | |
| WAN013HUW_at | 51.313 | Mm.291247 | 1E−150 | 90.798 | 98.788 | −1.687 | down |
| (SEQ ID NO: 1551) | | | | | | | |
| WAN008CLK_at | 48.214 | Mm.28650 | 1E−163 | 92.276 | 97.619 | −1.292 | down |
| (SEQ ID NO: 1552) | | | | | | | |
| WAN0088X9_at | 66.730 | Mm.275864 | 1E−161 | 92.157 | 87.262 | −1.374 | down |
| (SEQ ID NO: 1553) | | | | | | | |
| WAN013HZH_at | 47.826 | Mm.311696 | 1E−107 | 81.239 | 98.261 | −1.342 | down |
| (SEQ ID NO: 1554) | | | | | | | |

### Example 7

### Genes Differentially Expressed in Cells with High Cellular Growth Rate

[0141] A summary of nucleic acids identified as differentially expressed in cells with high cellular growth rate is provided in Tables 13 and 14. For each nucleic acid, a qualifier name, symbol, and title are provided, as well as whether the nucleic acid is up-regulated or down-regulated in the cells with higher maximum cellular productivity. For nucleic acids with human or mouse homologs in the Unigene database, the table provides Unigene ID numbers and statistics relating to the comparison, including e-values, percent sequence identities between the CHO sequence and the Unigene databank entries, and percent coverage (“% QC”).

TABLE 13
High Cell Growth Rate NA Unknown CHO Sequences

| | | | Human | |
|---|---|---|---|---|
| Qualifier List | Symbol | Title | Unigene ID | eValue |
| WAN0088JV_at | TRIB3 | Tribbles homolog 3 (Drosophila) | Hs.516826 | 4E−62 |
| (SEQ ID NO: 1555) | | | | |
| WAN0088PT_at | Psmc1 | Protease (prosome, macropain) 26S | Hs.356654 | 0 |
| (SEQ ID NO: 1556) | | subunit, ATPase 1 | | |
| WAN0088XH_at | HERPUD1 | Homocysteine-inducible, endoplasmic | Hs.146393 | 7E−79 |
| (SEQ ID NO: 1557) | | reticulum stress-inducible, ubiquitin-like | | |
| | | domain member 1 | | |
| WAN008BSH_at | CAT | Catalase | Hs.502302 | 6E−16 |
| (SEQ ID NO: 1558) | | | | |
| WAN008CM1_x_at | DQ390542.2 | Mitochondrial 12S ribosomal RNA | #N/A | |
| (SEQ ID NO: 1559) | | | | |
| WAN008CWC_x_at | NA | WAN008CWC 10603C-F10 | #N/A | |
| (SEQ ID NO: 1560) | | | | |
| WAN008D2Q_at | Eif4b | Eukaryotic translation initiation factor 4B | #N/A | 6E−49 |
| (SEQ ID NO: 1561) | | (Eif4b) | | |
| WAN008D5V_x_at | Gosr2 | Golgi SNAP receptor complex member 2, | Hs.463278 | |
| (SEQ ID NO: 1562) | | mRNA (cDNA clone MGC: 6437 | | |
| | | IMAGE: 3601627) | | |
| WAN008D6J_at | HMGA2 | High mobility group AT-hook 2 | Hs.505924 | 4E−62 |
| (SEQ ID NO: 1563) | | | | |
| WAN008DGD_at | Aplp2 | Amyloid beta (A4) precursor-like protein 2 | #N/A | |
| (SEQ ID NO: 1564) | | (Aplp2) | | |
| WAN008DJ9_at | SLC1A4 | Solute carrier family 1 (glutamate/neutral | Hs.323878 | 2E−39 |
| (SEQ ID NO: 1565) | | amino acid transporter), member 4 | | |
| WAN008DSE_at | SLC1A4 | Solute carrier family 1 (glutamate/neutral | Hs.323878 | 2E−82 |
| (SEQ ID NO: 1566) | | amino acid transporter), member 4 | | |
| WAN008E2E_at | PSMC4 | Proteasome (prosome, macropain) 26S | Hs.211594 | 1E−131 |
| (SEQ ID NO: 1567) | | subunit, ATPase, 4 | | |
| WAN008E8M_at | HADHB | Hydroxyacyl-Coenzyme A | Hs.515848 | 1E−114 |
| (SEQ ID NO: 1568) | | dehydrogenase/3-ketoacyl-Coenzyme A | | |
| | | thiolase/enoyl-Coenzyme A hydratase | | |
| | | (trifunctional protein), beta subunit | | |
| WAN008EBJ_at | Triobp | TRIO and F-actin binding protein | Hs.533030 | 6E−89 |
| (SEQ ID NO: 1569) | | | | |
| WAN008EFS_at | TXNRD1 | Thioredoxin reductase 1 | Hs.434367 | 6E−18 |
| (SEQ ID NO: 1570) | | | | |
| WAN008EGV_at | GDI2 | GDP dissociation inhibitor 2 | Hs.299055 | 0 |
| (SEQ ID NO: 1571) | | | | |
| WAN008EMQ_at | KPNA3 | Karyopherin alpha 3 (importin alpha 4) | Hs.527919 | 1E−144 |
| (SEQ ID NO: 1572) | | | | |
| WAN008ERL_at | ETFA | TYRO3P protein tyrosine kinase | Hs.39925 | 1E−135 |
| (SEQ ID NO: 1573) | | pseudogene | | |
| WAN008ETP_at | AADACL1 | Arylacetamide deacetylase-like 1 | Hs.444099 | 2E−72 |
| (SEQ ID NO: 1574) | | | | |
| WAN008EX2_x_at | IFRD1 | Interferon-related developmental regulator 1 | Hs.7879 | 7E−39 |
| (SEQ ID NO: 1575) | | | | |
| WAN013HUM_at | EHD4 | EH-domain containing 4 | Hs.143703 | 1E−95 |
| (SEQ ID NO: 1576) | | | | |
| WAN013HWG_at | DQ390542.2 | Mitochondrial NADH dehydrogenase | Hs.550202 | 5.00E−08 |
| (SEQ ID NO: 1577) | | subunit 5 | | |
| WAN013HX4_at | ESD | Esterase D/formylglutathione hydrolase | Hs.432491 | 1E−155 |
| (SEQ ID NO: 1578) | | | | |
| WAN013HYO_at | RPL11 | Ribosomal protein L11 | Hs.388664 | 0 |
| (SEQ ID NO: 1579) | | | | |
| WAN013I0W_at | TAPBP | TAP binding protein (tapasin) | Hs.370937 | 2E−57 |
| (SEQ ID NO: 1580) | | | | |
| WAN013I0X_at | GSS | Glutathione synthetase | Hs.82327 | 3E−96 |
| (SEQ ID NO: 1581) | | | | |
| WAN013I1G_at | SLC25A20 | Solute carrier family 25 | Hs.13845 | 1E−137 |
| (SEQ ID NO: 1582) | | (carnitine/acylcarnitine translocase), | | |
| | | member 20 | | |
| WAN013I38_at | Pkm2 | Pyruvate kinase, muscle, mRNA (cDNA | Hs.198281 | 3E−63 |
| (SEQ ID NO: 1583) | | clone MGC: 11908 IMAGE: 3598842) | | |
| WAN013I8K_at | DQ390542.2 | Mitochondrial cytochrome b | #N/A | |
| (SEQ ID NO: 1584) | | | | |

| | | | Mouse | | | | |
|---|---|---|---|---|---|---|---|
| Qualifier List | % ID | % QC | Unigene ID | eValue | % ID | % QC | |
| WAN0088JV_at | 81.778 | 86.37 | Mm.276018 | 1E−158 | 88.845 | 98.08 | down |
| (SEQ ID NO: 1555) | | | | | | | |
| WAN0088PT_at | 92.292 | 99.59 | Mm.157105 | 0 | 94.561 | 99.17 | down |
| (SEQ ID NO: 1556) | | | | | | | |
| WAN0088XH_at | 87.417 | 68.48 | Mm.29151 | 1E−144 | 91.463 | 92.97 | down |
| (SEQ ID NO: 1557) | | | | | | | |
| WAN008BSH_at | 89.286 | 38.71 | Mm.4215 | 3E−41 | 89.247 | 85.71 | down |
| (SEQ ID NO: 1558) | | | | | | | |
| WAN008CM1_x_at | | | #N/A | 0 | 0 | 0 | up |
| (SEQ ID NO: 1559) | | | | | | | |
| WAN008CWC_x_at | | | #N/A | | | | up |
| (SEQ ID NO: 1560) | | | | | | | |
| WAN008D2Q_at | 92.949 | 29.38 | Mm.290022 | 1E−129 | 91.316 | 71.56 | up |
| (SEQ ID NO: 1561) | | | | | | | |
| WAN008D5V_x_at | | | Mm.195451 | 1E−08 | 90.196 | 43.59 | down |
| (SEQ ID NO: 1562) | | | | | | | |
| WAN008D6J_at | 94.805 | 33.33 | Mm.157190 | 1E−130 | 90.444 | 97.4 | down |
| (SEQ ID NO: 1563) | | | | | | | |
| WAN008DGD_at | | | Mm.19133 | 7E−69 | 93.088 | 44.47 | down |
| (SEQ ID NO: 1564) | | | | | | | |
| WAN008DJ9_at | 86.932 | 39.46 | Mm.6379 | 1E−121 | 88.614 | 90.58 | down |
| (SEQ ID NO: 1565) | | | | | | | |
| WAN008DSE_at | 86.89 | 60.18 | Mm.6379 | 1E−117 | 90.643 | 62.75 | down |
| (SEQ ID NO: 1566) | | | | | | | |
| WAN008E2E_at | 89.95 | 100 | Mm.29582 | 1E−141 | 90.955 | 100 | down |
| (SEQ ID NO: 1567) | | | | | | | |
| WAN008E8M_at | 88.191 | 85.78 | Mm.291463 | 1E−162 | 91.256 | 96.12 | down |
| (SEQ ID NO: 1568) | | | | | | | |
| WAN008EBJ_at | 87.613 | 61.87 | Mm.123714 | 1E−175 | 90.707 | 92.52 | down |
| (SEQ ID NO: 1569) | | | | | | | |
| WAN008EFS_at | 86.777 | 22.08 | Mm.210155 | 2E−54 | 88.393 | 40.88 | down |
| (SEQ ID NO: 1570) | | | | | | | |
| WAN008EGV_at | 92.897 | 94.86 | Mm.8070 | 0 | 94.019 | 94.86 | down |
| (SEQ ID NO: 1571) | | | | | | | |
| WAN008EMQ_at | 91.853 | 100 | Mm.25548 | 0 | 96.334 | 100 | down |
| (SEQ ID NO: 1572) | | | | | | | |
| WAN008ERL_at | 95.57 | 87.05 | | 1E−162 | 95.868 | 100 | down |
| (SEQ ID NO: 1573) | | | | | | | |
| WAN008ETP_at | 86.942 | 97.65 | Mm.24576 | 8E−89 | 88.926 | 100 | down |
| (SEQ ID NO: 1574) | | | | | | | |
| WAN008EX2_x_at | 90.299 | 100 | Mm.168 | 6E−63 | 97.761 | 100 | down |
| (SEQ ID NO: 1575) | | | | | | | |
| WAN013HUM_at | 92.771 | 59 | Mm.132226 | 1E−132 | 89.286 | 99.53 | down |
| (SEQ ID NO: 1576) | | | | | | | |
| WAN013HWG_at | 85 | 6.525 | #N/A | | | | up |
| (SEQ ID NO: 1577) | | | | | | | |
| WAN013HX4_at | 87.617 | 93.51 | Mm.38055 | 0 | 91.902 | 93.16 | down |
| (SEQ ID NO: 1578) | | | | | | | |
| WAN013HYO_at | 90.522 | 100 | Mm.276856 | 0 | 91.473 | 99.81 | up |
| (SEQ ID NO: 1579) | | | | | | | |
| WAN013I0W_at | 80.633 | 93.23 | Mm.154457 | 1E−149 | 86.885 | 95.31 | down |
| (SEQ ID NO: 1580) | | | | | | | |
| WAN013I0X_at | 90.444 | 56.13 | Mm.252316 | 1E−129 | 95.189 | 55.75 | down |
| (SEQ ID NO: 1581) | | | | | | | |
| WAN013I1G_at | 86.706 | 87.65 | Mm.29666 | 0 | 92.354 | 86.43 | down |
| (SEQ ID NO: 1582) | | | | | | | |
| WAN013I38_at | 90.521 | 38.36 | Mm.216135 | 0 | 92.99 | 88.18 | down |
| (SEQ ID NO: 1583) | | | | | | | |
| WAN013I8K_at | | | #N/A | | | | up |
| (SEQ ID NO: 1584) | | | | | | | |

[0142] TABLE 14
High Cell Growth Rate NA Known CHO Sequences

| | | | Human | | | | Mouse | | | | |
|---|---|---|---|---|---|---|---|---|---|---|---|
| Qualifier List | Symbol | Title | Unigene ID | eValue | % ID | % QC | Unigene ID | eValue | % ID | % QC | |
| AF081143_at | RPS18 | Ribosomal protein S18 | Hs.546290 | 1E−78 | 90.717 | 98.34 | Mm.324762 | 4E−93 | 92.946 | 100 | up |
| (SEQ ID NO: 1585) | | | | | | | | | | | |
| U62588_x_at | SDC1 | Syndecan 1 | Hs.224607 | 1E−32 | 93 | 53.19 | Mm.2580 | 7E−48 | 90.85 | 81.38 | down |
| (SEQ ID NO: 1586) | | | | | | | | | | | |
| X51747_at | HSPB1 | Heat shock 27 kDa | Hs.520973 | 1E−101 | 87.368 | 50.53 | Mm.13849 | 0 | 91.952 | 66.09 | up |
| (SEQ ID NO: 1587) | | protein 1 | | | | | | | | | |

### Example 8

### Genes Differentially Expressed in Cells with High Peak Cell Density

[0143] A summary of nucleic acids identified as differentially expressed in cells with high peak cell density is provided in Tables 15, 16, and 17. For each nucleic acid, a qualifier name, symbol, and title are provided, as well as whether the nucleic acid is up-regulated or down-regulated in the cells with higher maximum cellular productivity. For nucleic acids with human or mouse homologs in the Unigene database, the table provides Unigene ID numbers and statistics relating to the comparison, including e-values, percent sequence identities between the CHO sequence and the Unigene databank entries, and percent coverage (“% QC”).

TABLE 15
High Cell Density Unknown CHO Sequences

| | | | | | | | | | | | Direction of |
|---|---|---|---|---|---|---|---|---|---|---|---|
| | | | Human | | | | Mouse | | | | change |
| Qualifier List | Symbol | Title | Unigene ID | eValue | % ID | % QC | Unigene ID | eValue | % ID | % QC | (test vs control) |
| WAN0088J9_x_at | CCNA2 | cyclin A2 | Hs.85137 | 1.00E−55 | 87.6494 | 20.291 | Mm.4189 | 4.00E−60 | 89.423 | 16.815 | up |
| (SEQ ID | | | | | | | | | | | |
| NO: 1588) | | | | | | | | | | | |
| WAN0088PR_at | CCPG1 | Phosphatidylinositol glycan, class B | Hs.285051 | 2E−08 | 87.5 | 11.429 | Mm.268475 | 3E−34 | 90.244 | 21.964 | down |
| (SEQ ID | | | | | | | | | | | |
| NO: 1589) | | | | | | | | | | | |
| WAN0088Q6_at | Hist1h2bn | Histone 1, H2bn | Hs.534368 | 1E−153 | 93.7158 | 63.432 | Mm.261676 | 0 | 95.134 | 71.231 | down |
| (SEQ ID | | | | | | | | | | | |
| NO: 1590) | | | | | | | | | | | |
| WAN0088S8_at | SLC29A1 | Solute carrier family 29 | Hs.25450 | 3E−35 | 81.3559 | 76.129 | Mm.29744 | 6E−97 | 86.098 | 88.172 | up |
| (SEQ ID | | (nucleoside transporters), | | | | | | | | | |
| NO: 1591) | | member 1 | | | | | | | | | |
| WAN0088T2_at | ATF4 | Activating transcription factor 4 | Hs.496487 | 1E−158 | 88.5397 | 97.83 | Mm.641 | 0 | 91.714 | 96.022 | up |
| (SEQ ID | | (tax-responsive enhancer element B67) | | | | | | | | | |
| NO: 1592) | | | | | | | | | | | |
| WAN0088X2_at | PEO1 | Progressive external | Hs.22678 | 1E−141 | 88.651 | 94.534 | Mm.105585 | 7E−78 | 90.678 | 47.773 | up |
| (SEQ ID | | ophthalmoplegia 1 | | | | | | | | | |
| NO: 1593) | | | | | | | | | | | |
| WAN008BRK_at | Tmsb4x | Thymosin, beta 4, X | Hs.522584 | 1E−153 | 93.617 | 71.756 | Mm.142729 | 0 | 95.34 | 98.282 | down |
| (SEQ ID | | chromosome | | | | | | | | | |
| NO: 1594) | | | | | | | | | | | |
| WAN008BSG_x_at | TRAM1 | Translocation associated | Hs.491988 | 7E−29 | 89.9225 | 36.236 | Mm.28765 | 5E−44 | 91.787 | 58.146 | up |
| (SEQ ID | | membrane protein 1 | | | | | | | | | |
| NO: 1595) | | | | | | | | | | | |
| WAN008CHP_x_at | NA | WAN008CHP 10599D-H02 | #N/A | | | | #N/A | | | | up |
| (SEQ ID | | | | | | | | | | | |
| NO: 1596) | | | | | | | | | | | |
| WAN008CM7_x_at | MRPL51 | Mitochondrial ribosomal protein | Hs.55847 | 0.0002 | 82.0225 | 25.356 | Mm.354426 | 6E−13 | 84.466 | 29.345 | up |
| (SEQ ID | | L51 | | | | | | | | | |
| NO: 1597) | | | | | | | | | | | |
| WAN008CQP_at | AATF | Apoptosis antagonizing | Hs.195740 | 6E−73 | 83.7587 | 99.309 | Mm.257482 | 8E−99 | 85.615 | 99.309 | up |
| (SEQ ID | | transcription factor | | | | | | | | | |
| NO: 1598) | | | | | | | | | | | |
| WAN008CX9_at | ISGF3G | Interferon-stimulated | Hs.1706 | 2E−64 | 83.4225 | 81.481 | Mm.2032 | 1E−119 | 88.424 | 88.453 | up |
| (SEQ ID | | transcription factor 3, gamma | | | | | | | | | |
| NO: 1599) | | 48 kDa | | | | | | | | | |
| WAN008CXC_at | ATP6V0A1 | ATPase, H+ transporting, | Hs.463074 | 0 | 93.2927 | 99.394 | Mm.340818 | 0 | 94.343 | 100 | down |
| (SEQ ID | | lysosomal V0 subunit a isoform 1 | | | | | | | | | |
| NO: 1600) | | | | | | | | | | | |
| WAN008D2S_at | BPY2IP1 | BPY2 interacting protein 1 | Hs.66048 | 6E−15 | 84.0336 | 20.951 | Mm.248559 | 1E−101 | 86.99 | 69.014 | down |
| (SEQ ID | | | | | | | | | | | |
| NO: 1601) | | | | | | | | | | | |
| WAN008D3Z_at | GALNT7 | UDP-N-acetyl-alpha-D- | Hs.127407 | 1E−135 | 88.8668 | 100 | Mm.62886 | 1E−150 | 90.855 | 100 | down |
| (SEQ ID | | galactosamine:polypeptide N- | | | | | | | | | |
| NO: 1602) | | acetylgalactosaminyltransferase 7 (GalNAc-T7) | | | | | | | | | |
| WAN008D55-rc_at | LAMB1 | Laminin, beta 1 | Hs.489646 | 1E−155 | 87.8229 | 97.482 | Mm.172674 | 1E−161 | 91.667 | 77.698 | 1up, 1down |
| (SEQ ID | | | | | | | | | | | |
| NO: 1603) | | | | | | | | | | | |
| WAN008D5V_x_at | Gosr2 | Golgi SNAP receptor complex | Hs.463278 | | | | Mm.195451 | 1E−08 | 90.196 | 43.59 | down |
| (SEQ ID | | member 2, mRNA (cDNA clone | | | | | | | | | |
| NO: 1562) | | MGC: 6437 IMAGE: 3601627) | | | | | | | | | |
| WAN008D6R_at | TMED4 | Transmembrane emp24 protein | Hs.510745 | 1E−111 | 91.0828 | 73.709 | Mm.254495 | 1E−140 | 92.412 | 86.62 | down |
| (SEQ ID | | transport domain containing 4 | | | | | | | | | |
| NO: 1604) | | | | | | | | | | | |
| WAN008DFT_at | ABHD6 | Abhydrolase domain containing 6 | Hs.476454 | 3E−17 | 83.2168 | 26.335 | Mm.181473 | 9E−53 | 87.124 | 42.91 | up |
| (SEQ ID | | | | | | | | | | | |
| NO: 1605) | | | | | | | | | | | |
| WAN008DGZ_at | SLC7A6OS | Solute carrier family 7, member | Hs.334848 | 2E−79 | 84.2342 | 79.428 | Mm.269029 | 1E−139 | 89.862 | 77.639 | up |
| (SEQ ID | | 6 opposite strand | | | | | | | | | |
| NO: 1606) | | | | | | | | | | | |
| WAN008DI7_at | FBXO42 | F-box protein 42 | #N/A | | | | Mm.28865 | 2E−23 | 86.957 | 68.452 | down |
| (SEQ ID | | | | | | | | | | | |
| NO: 1607) | | | | | | | | | | | |
| WAN008DIA_at | U2AF1 | U2(RNU2) small nuclear RNA | Hs.365116 | 1E−170 | 90.5544 | 97.4 | Mm.311063 | 0 | 95.4 | 100 | up |
| (SEQ ID | | auxiliary factor 1 | | | | | | | | | |
| NO: 1608) | | | | | | | | | | | |
| WAN008DJ8_f_at | Ubc | Ubiquitin C, mRNA (cDNA | Hs.378821 | 1E−22 | 87.8049 | 24.848 | Mm.331 | 2E−25 | 88.618 | 24.848 | down |
| (SEQ ID | | clone IMAGE: 2645223) | | | | | | | | | |
| NO: 1609) | | | | | | | | | | | |
| WAN008DMI_at | ACSL5 | Acyl-CoA synthetase long-chain | Hs.11638 | 1E−118 | 85 | 96.601 | #N/A | 0 | 89.946 | 99.642 | up |
| (SEQ ID | | family member 5 | | | | | | | | | |
| NO: 1610) | | | | | | | | | | | |
| WAN008DMJ_at | NAB2 | NGFI-A binding protein 2 | Hs.159223 | 1E−176 | 89.5717 | 100 | Mm.336898 | 0 | 92.683 | 99.255 | up |
| (SEQ ID | | (EGR1 binding protein 2) | | | | | | | | | |
| NO: 1611) | | | | | | | | | | | |
| WAN008DQE_at | YES1 | V-yes-1 Yamaguchi sarcoma | Hs.194148 | 0 | 94.8529 | 100 | #N/A | 0 | 95.588 | 100 | up |
| (SEQ ID | | viral oncogene homolog 1 | | | | | | | | | |
| NO: 1612) | | | | | | | | | | | |
| WAN008DS9_at | CFL2 | Cofilin 2 (muscle) | Hs.180141 | 1E−113 | 89.0187 | 90.87 | Mm.276826 | 1E−132 | 92.982 | 84.713 | down |
| (SEQ ID | | | | | | | | | | | |
| NO: 1613) | | | | | | | | | | | |
| WAN008DWJ_at | USP1 | Similar to ubiquitin specific | Hs.35086 | 0 | 92.9476 | 97.018 | Mm.371692 | 0 | 94.182 | 96.491 | up |
| (SEQ ID | | protease 1 | | | | | | | | | |
| NO: 1614) | | | | | | | | | | | |
| WAN008DZF_at | AL033326 | Expressed sequence AL033326 | #N/A | 1E−92 | 87.0558 | 99.747 | Mm.182145 | 1E−156 | 92.658 | 100 | down |
| (SEQ ID | | | | | | | | | | | |
| NO: 1615) | | | | | | | | | | | |
| WAN008E06_at | Rabep2 | Rabaptin, RAB GTPase binding | Hs.555978 | 2E−92 | 85.4722 | 76.34 | Mm.35467 | 0 | 91.37 | 98.521 | down |
| (SEQ ID | | effector protein 2 | | | | | | | | | |
| NO: 1616) | | | | | | | | | | | |
| WAN008E1M_f_at | CD36 | CD36 antigen | Hs.120949 | 0.00001 | 90.9091 | 3.0513 | Mm.18628 | 7.00E−19 | 85.714 | 9.2233 | down |
| (SEQ ID | | | | | | | | | | | |
| NO: 1617) | | | | | | | | | | | |
| WAN008E2Q_at | GSPT1 | G1 to S phase transition 1 | Hs.528780 | 0 | 93.6957 | 100 | Mm.325827 | 0 | 95.87 | 100 | up |
| (SEQ ID | | | | | | | | | | | |
| NO: 1618) | | | | | | | | | | | |
| WAN008E5L_at | SLC1A5 | Solute carrier family 1 (neutral | Hs.515494 | 8E−42 | 84.1667 | 45.627 | Mm.1056 | 1E−115 | 87.671 | 83.27 | up |
| (SEQ ID | | amino acid transporter), member 5 | | | | | | | | | |
| NO: 1619) | | | | | | | | | | | |
| WAN008E9N_at | KLHL7 | Kelch-like 7 (Drosophila) | Hs.385861 | 1E−150 | 89.4422 | 99.406 | Mm.273768 | 0 | 93.111 | 89.109 | down |
| (SEQ ID | | | | | | | | | | | |
| NO: 1620) | | | | | | | | | | | |
| WAN008EBP_at | Sqstm1 | Sequestosome 1 | Hs.529892 | 0 | 93.4066 | 97.849 | Mm.40828 | 0 | 93.407 | 97.849 | down |
| (SEQ ID | | | | | | | | | | | |
| NO: 1621) | | | | | | | | | | | |
| WAN008EH5_at | PRNP | Prion protein (p27-30) | Hs.472010 | 9E−45 | 86.802 | 34.806 | Mm.648 | 4E−92 | 89.815 | 57.24 | down |
| (SEQ ID | | (Creutzfeld-Jakob disease, | | | | | | | | | |
| NO: 1622) | | Gerstmann-Strausler-Scheinker | | | | | | | | | |
| | | syndrome, fatal familial | | | | | | | | | |
| | | insomnia) | | | | | | | | | |
| WAN008EID_at | TRIB3 | Tribbles homolog 3 (Drosophila) | Hs.516826 | 1E−12 | 92.7273 | 12.195 | Mm.276018 | 1E−51 | 89.773 | 39.024 | up |
| (SEQ ID | | | | | | | | | | | |
| NO: 1623) | | | | | | | | | | | |
| WAN008EJY_at | NA | WAN008EJY 11232A-H04 | #N/A | | | | #N/A | | | | up |
| (SEQ ID | | | | | | | | | | | |
| NO: 1624) | | | | | | | | | | | |
| WAN008EKK_at | PSMA8 | Proteasome (prosome, | Hs.464813 | 1E−104 | 91.6667 | 98.63 | Mm.87277 | 2E−89 | 90.182 | 94.178 | down |
| (SEQ ID | | macropain) subunit, alpha type, 8 | | | | | | | | | |
| NO: 1625) | | | | | | | | | | | |
| WAN008ELE_at | PSAT1 | Phosphoserine aminotransferase 1 | Hs.494261 | 7E−27 | 93.1034 | 16.171 | Mm.289936 | 5E−70 | 87.54 | 58.178 | up |
| (SEQ ID | | | | | | | | | | | |
| NO: 1626) | | | | | | | | | | | |
| WAN008EM4_at | ARHGAP18 | Rho GTPase activating protein | Hs.486458 | 1E−109 | 85.3516 | 97.897 | Mm.356496 | 1E−147 | 87.763 | 100 | down |
| (SEQ ID | | 18 | | | | | | | | | |
| NO: 1627) | | | | | | | | | | | |
| WAN008END_at | SCYL1 | SCY1-like 1 (S. cerevisiae) | Hs.238839 | 2E−61 | 83.3333 | 74.844 | Mm.276063 | 0 | 92.292 | 99.792 | down |
| (SEQ ID | | | | | | | | | | | |
| NO: 1628) | | | | | | | | | | | |
| WAN008EOB_at | NOL1 | Nucleolar protein 1, 120 kDa | Hs.534334 | 8E−48 | 89.8058 | 42.474 | Mm.29203 | 1E−120 | 87.248 | 92.165 | up |
| (SEQ ID | | | | | | | | | | | |
| NO: 1629) | | | | | | | | | | | |
| WAN008EQM_at | NA | RC WAN008EQM 11232D-D11 | #N/A | | | | #N/A | | | | down |
| (SEQ ID | | | | | | | | | | | |
| NO: 1630) | | | | | | | | | | | |
| WAN008ERB_at | PCBP1 | Poly(rC) binding protein 1 | Hs.2853 | 0 | 96.7611 | 99.396 | Mm.274146 | 0 | 97.586 | 100 | up |
| (SEQ ID | | | | | | | | | | | |
| NO: 1631) | | | | | | | | | | | |
| WAN008ER1_at | FNBP3 | Formin binding protein 3 | Hs.298735 | 4E−81 | 96.6102 | 98.883 | Mm.257474 | 2E−94 | 99.441 | 100 | down |
| (SEQ ID | | | | | | | | | | | |
| NO: 1632) | | | | | | | | | | | |
| WAN008ERO_at | SNAG1 | Sorting nexin associated golgi | Hs.432755 | 7E−30 | 89.1156 | 28.215 | Mm.33721 | 3E−40 | 90.511 | 26.296 | up |
| (SEQ ID | | protein 1 | | | | | | | | | |
| NO: 1633) | | | | | | | | | | | |
| WAN008ERP_at | LEPREL1 | Leprecan-like 1 | Hs.374191 | 1E−45 | 87.1245 | 92.829 | Mm.326869 | 1E−68 | 88.983 | 94.024 | down |
| (SEQ ID | | | | | | | | | | | |
| NO: 1634) | | | | | | | | | | | |
| WAN008EUO_at | LPL | Lipoprotein lipase | Hs.180878 | 2E−82 | 87.5 | 74.109 | Mm.1514 | 1E−113 | 91.667 | 74.109 | down |
| (SEQ ID | | | | | | | | | | | |
| NO: 1635) | | | | | | | | | | | |
| WAN008EY0_at | C330017I15Rik | RIKEN cDNA C330017I15 gene | Hs.520619 | 1E−179 | 90.2111 | 99.049 | Mm.58660 | 1E−163 | 88.783 | 100 | up |
| (SEQ ID | | | | | | | | | | | |
| NO: 1636) | | | | | | | | | | | |
| WAN008F1P_x_at | NA | WAN008F1P 11165A-A01 | #N/A | | | | #N/A | | | | down |
| (SEQ ID | | | | | | | | | | | |
| NO: 1637) | | | | | | | | | | | |
| WAN013HVJ_at | Rn.75246 | Similar to RIKEN cDNA | #N/A | 7E−78 | 83.6683 | 71.583 | #N/A | 1E−118 | 87.112 | 75.36 | down |
| (SEQ ID | | 2310045A20 | | | | | | | | | |
| NO: 1638) | | | | | | | | | | | |
| WAN013HVL_at | UGDH | UDP-glucose dehydrogenase | Hs.28309 | 1E−160 | 89.3805 | 97.835 | Mm.344831 | 1E−160 | 89.231 | 98.485 | up |
| (SEQ ID | | | | | | | | | | | |
| NO: 1639) | | | | | | | | | | | |
| WAN013HW0_x_at | DQ390542.2 | Mitochondrial NADH | Hs.326475 | 7E−23 | 82.5688 | 16.257 | #N/A | | | | up |
| (SEQ ID | | dehydrogenase subunit 1 | | | | | | | | | |
| NO: 1640) | | | | | | | | | | | |
| WAN013HWB_at | APLP2 | Amyloid beta (A4) precursor-like | Hs.370247 | 3E−08 | 85.5263 | 9.7812 | Mm.19133 | 1E−161 | 95 | 46.332 | down |
| (SEQ ID | | protein 2 | | | | | | | | | |
| NO: 1641) | | | | | | | | | | | |
| WAN013HX8_f_at | EIF4A2 | Eukaryotic translation initiation | Hs.478553 | 1E−155 | 95.8199 | 100 | Mm.260084 | 1E−155 | 95.82 | 100 | down |
| (SEQ ID | | factor 4A, isoform 2 | | | | | | | | | |
| NO: 1490) | | | | | | | | | | | |
| WAN013HZ3_at | ARMCX3 | Armadillo repeat containing, X- | Hs.172788 | 4E−09 | 91.8367 | 9.9796 | Mm.67949 | 4E−29 | 82.684 | 47.047 | down |
| (SEQ ID | | linked 3 | | | | | | | | | |
| NO: 1642) | | | | | | | | | | | |
| WAN013HZK_at | NA | Cluster includes WAN008DS2 | #N/A | | | | #N/A | 7E−10 | 88.372 | 17.587 | up |
| (SEQ ID | | 11228C-H04 | | | | | | | | | |
| NO: 1643) | | | | | | | | | | | |
| WAN013HZP_at | Eif4g2 | Eukaryotic translation initiation | Hs.183684 | 1E−179 | 97.7465 | 72.449 | Mm.185453 | 0 | 99.718 | 72.449 | up |
| (SEQ ID | | factor 4, gamma 2 | | | | | | | | | |
| NO: 1644) | | | | | | | | | | | |
| WAN013I01_at | MCFD2 | Multiple coagulation factor | Hs.293689 | 4E−59 | 89.5604 | 52 | Mm.30251 | 2E−35 | 84.699 | 52.286 | down |
| (SEQ ID | | deficiency 2 | | | | | | | | | |
| NO: 1645) | | | | | | | | | | | |
| WAN013I05_at | Abcb6 | ATP-binding cassette, sub-family | Hs.107911 | 1E−154 | 87.1508 | 100 | Mm.28663 | 0 | 91.806 | 100 | up |
| (SEQ ID | | B (MDR/TAP), member 6 | | | | | | | | | |
| NO: 1646) | | | | | | | | | | | |
| WAN013I15_at | SUCLG2 | Succinate-CoA ligase, GDP- | Hs.186512 | 1E−157 | 85.8195 | 100 | Mm.292637 | 0 | 88.398 | 100 | up |
| (SEQ ID | | forming, beta subunit | | | | | | | | | |
| NO: 1647) | | | | | | | | | | | |
| WAN013I1U_x_at | DQ390542.2 | Mitochondrial NADH | Hs.571926 | 0.00002 | 92.1053 | 7.7079 | #N/A | 0.00001 | 92.105 | 7.7079 | up |
| (SEQ ID | | dehydrogenase subunit 4 | | | | | | | | | |
| NO: 1648) | | | | | | | | | | | |
| WAN013I2F_at | THBD | Thrombomodulin | Hs.2030 | 1E−18 | 88.764 | 18.053 | Mm.24096 | 9E−93 | 85.714 | 92.292 | up |
| (SEQ ID | | | | | | | | | | | |
| NO: 1649) | | | | | | | | | | | |
| WAN013I2K_at | TMEFF1 | Transmembrane protein with | Hs.336224 | 8E−93 | 91.0781 | 100 | Mm.130982 | 7E−86 | 89.963 | 100 | down |
| (SEQ ID | | EGF-like and two follistatin-like | | | | | | | | | |
| NO: 1650) | | domains 1 | | | | | | | | | |
| WAN013I2L_at | SLC7A5 | solute carrier family 7 (cationic | Hs.513797 | 9.00E−07 | 100 | 2.2523 | Mm.27943 | 1.00E−07 | 92 | 3.7538 | up |
| (SEQ ID | | amino acid transporter, y+ | | | | | | | | | |
| NO: 1651) | | system), member 5 | | | | | | | | | |
| WAN013I2T_at | CBX5 | Chromobox homolog 5 (HP1 | Hs.349283 | 1E−142 | 91.8635 | 72.023 | Mm.262059 | 1E−168 | 94.751 | 72.023 | up |
| (SEQ ID | | alpha homolog, Drosophila) | | | | | | | | | |
| NO: 1652) | | | | | | | | | | | |
| WAN013I3P_at | CAMLG | Calcium modulating ligand | Hs.529846 | 1E−147 | 86.7021 | 99.296 | #N/A | 1E−172 | 88.612 | 98.944 | up |
| (SEQ ID | | | | | | | | | | | |
| NO: 1653) | | | | | | | | | | | |
| WAN013I61_at | Nppb | Natriuretic peptide precursor type B | Hs.219140 | | | | Mm.2740 | 5E−30 | 88.281 | 23.146 | down |
| (SEQ ID | | | | | | | | | | | |
| NO: 1654) | | | | | | | | | | | |
| WAN013I6C_at | SLC16A1 | Solute carrier family 16 | Hs.75231 | 2E−26 | 84.472 | 12.697 | Mm.9086 | 1E−110 | 87.24 | 30.284 | up |
| (SEQ ID | | (monocarboxylic acid | | | | | | | | | |
| NO: 1655) | | transporters), member 1 | | | | | | | | | |
| WAN013I6E_x_at | GSTP1 | Glutathione S-transferase pi | Hs.523836 | 1E−129 | 81.9905 | 85.889 | #N/A | 0 | 87.577 | 88.467 | down |
| (SEQ ID | | | | | | | | | | | |
| NO: 1656) | | | | | | | | | | | |
| WAN013I6J_s_at | CAD | Carbamoyl-phosphate synthetase | Hs.377010 | 0 | 91.1552 | 99.461 | Mm.305535 | 0 | 93.502 | 99.461 | up |
| (SEQ ID | | 2, aspartate transcarbamylase, | | | | | | | | | |
| NO: 1657) | | and dihydroorotase | | | | | | | | | |
| WAN013I6P_x_at | ABCB1 | ATP-binding cassette, sub-family | Hs.489033 | 0 | 87.7104 | 28.592 | Mm.146649 | 0 | 89.771 | 33.646 | down |
| (SEQ ID | | B (MDR/TAP), member 1 | | | | | | | | | |
| NO: 1658) | | | | | | | | | | | |
| WAN013I8B_at | Akr1a4 | Aldo-keto reductase family 1, | Hs.474584 | 0 | 91.5371 | 99.314 | Mm.30085 | 0 | 91.71 | 99.314 | down |
| (SEQ ID | | member A4 (aldehyde reductase) | | | | | | | | | |
| NO: 1659) | | | | | | | | | | | |
| WAN013I8V_at | NCL | Nucleolin | Hs.79110 | 1E−111 | 90.0585 | 67.059 | Mm.154378 | 1E−137 | 93.275 | 67.059 | up |
| (SEQ ID | | | | | | | | | | | |
| NO: 1660) | | | | | | | | | | | |
| WAN013I8X_at | HSPD1 | Heat shock 60 kDa protein 1 | Hs.113684 | 0 | 90.308 | 99.775 | Mm.1777 | 0 | 93.388 | 99.775 | Up |
| (SEQ ID | | (chaperonin) | | | | | | | | | |
| NO: 1661) | | | | | | | | | | | |
| WAN013I9F_at | HSPA9B | Heat shock protein 9A | Hs.184233 | 3E−29 | 92.233 | 18.693 | Mm.209419 | 2E−72 | 90.688 | 44.828 | Up |
| (SEQ ID | | | | | | | | | | | |
| NO: 1662) | | | | | | | | | | | |
| WAN013I9G_at | SLC3A2 | Solute carrier family 3 (activators | Hs.502769 | 1E−105 | 84.8544 | 38.064 | Mm.4114 | 0 | 88.596 | 58.98 | Up |
| (SEQ ID | | of dibasic and neutral amino acid | | | | | | | | | |
| NO: 1663) | | transport), member 2 | | | | | | | | | |
| WAN013I9Z_at | GNAS | guanine nucleotide binding | Hs.125898 | | | | Mm.125770 | 0 | 94.403 | 41.104 | Down |
| (SEQ ID | | protein, alpha stimulating | | | | | | | | | |
| NO: 1664) | | | | | | | | | | | |

[0144] TABLE 16
High Cell Density Known CHO Sequences

[chemical structure]

[0145] TABLE 17
Control vs. Test HCD4

| | | | | | | | | | | | | |
|---|---|---|---|---|---|---|---|---|---|---|---|---|
| 1.5F Up | | | | | | | | | | | | |
| WAN0088WZ-rc_at | 1.736111 | APC | Adenomatosis polyposis coli | WAN0088WZ- | Hs.158932 | 2E−50 | 84.75177 | 99.29577 | Mm.7883 | 2E−80 | 89.70588 | 95.77465 |
| (SEQ ID NO: 1675) | | | | rc_at Blast | | | | | | | | |
| | | | | Report | | | | | | | | |
| AF052840_x_at | 2.73224 | NA | AF052840 Mesocricetus auratus clone | AF052840_x_at | #N/A | 0 | 0 | 0 | #N/A | 0 | 0 | 0 |
| (SEQ ID NO: 1676) | | | ut3 retroviral-like pol protein (pol) | Blast Report | | | | | | | | |
| | | | mRNA, partial cds. | | | | | | | | | |
| AF306800_at | 1.610306 | NA | AF306800 Cricetulus griseus clone cos7- | AF306800_at | #N/A | 0.00006 | 94.28571 | 2.571639 | #N/A | 0.000008 | 94.44444 | 2.645114 |
| (SEQ ID NO: 1677) | | | 1 intrachromosomal telomeric-like | Blast Report | | | | | | | | |
| | | | sequence. | | | | | | | | | |
| WAN008ED8_at | 1.519757 | AVPI1 | Arginine vasopressin-induced 1 | WAN008ED8_at | Hs.23918 | 3E−44 | 84.27419 | 49.8994 | Mm.30060 | 1E−133 | 88.2716 | 97.78672 |
| (SEQ ID NO: 1678) | | | | Blast Report | | | | | | | | |
| AY011521_x_at | 1.564945 | BMI1 | B lymphoma Mo-MLV insertion region | AY011521_x_at | Hs.496613 | 1E−118 | 96.40288 | 100 | Mm.289584 | 1E−121 | 95.68345 | 100 |
| (SEQ ID NO: 1679) | | | (mouse) | Blast Report | | | | | | | | |
| WAN013I3P_at | 1.745201 | CAMLG | Calcium modulating ligand | WAN013I3P_at | Hs.529846 | 1E−147 | 86.70213 | 99.29577 | #N/A | 1E−172 | 88.6121 | 98.94366 |
| (SEQ ID NO: 1653) | | | | Blast Report | | | | | | | | |
| WAN008CI3_at | 1.811594 | CCNJ | Cyclin J | WAN008CI3_at | Hs.596479 | 1E−145 | 93.71429 | 77.60532 | Mm.309 | 1E−105 | 88.85714 | 77.60532 |
| (SEQ ID NO: 1680) | | | | Blast Report | | | | | | | | |
| D11437_at | 1.506024 | Cyp2c55 | Cytochrome P450, family 2, subfamily c, | D11437_at Blast | #N/A | 2E−73 | 84.0617 | 68.12609 | Mm.142581 | 0 | 91.66667 | 94.57093 |
| (SEQ ID NO: 1681) | | | polypeptide 55 | Report | | | | | | | | |
| X81405_at | 1.587302 | EN2 | Engrailed homolog 2 | X81405_at Blast | Hs.134989 | 5E−69 | 92.59259 | 81.11588 | Mm.4298 | 7E−30 | 92.63158 | 40.77253 |
| (SEQ ID NO: 1682) | | | | Report | | | | | | | | |
| U67146_at | 1.680672 | EEF1E1 | Eukaryotic translation elongation factor 1 | U67146_at Blast | Hs.631818 | 1E−152 | 88.62275 | 63.90306 | Mm.36683 | 0 | 89.70381 | 90.43367 |
| (SEQ ID NO: 1683) | | | epsilon 1 | Report | | | | | | | | |
| WAN008E2Q_at | 3.521127 | GSPT1 | G1 to S phase transition 1 | WAN008E2Q_at | Hs.528780 | 0 | 93.69565 | 100 | Mm.325827 | 0 | 95.86957 | 100 |
| (SEQ ID NO: 1618) | | | | Blast Report | | | | | | | | |
| WAN008CWV_at | 1.66113 | HDGF | Hepatoma-derived growth factor (high- | WAN008CWV_at | Hs.506748 | 3E−75 | 91.48936 | 43.04029 | Mm.292208 | 2E−75 | 91.48936 | 43.04029 |
| (SEQ ID NO: 1684) | | | mobility group protein 1-like) | Blast Report | | | | | | | | |
| U43278_at | 1.626016 | Msr1 | Macrophage scavenger receptor 1 | U43278_at Blast | Hs.632045 | 0 | 0 | 0 | Mm.239291 | 7E−64 | 87.5 | 92.8839 |
| (SEQ ID NO: 1685) | | | | Report | | | | | | | | |
| Z30972_at | 2.09205 | PPARG | Peroxisome proliferative activated | Z30972_at Blast | Hs.162646 | 6E−70 | 91.62562 | 46.88222 | Mm.3020 | 1E−78 | 93.17073 | 47.34411 |
| (SEQ ID NO: 1686) | | | receptor, gamma | Report | | | | | | | | |
| WAN008DRG_at | 1.607717 | PGM1 | Phosphoglucomutase 1 | WAN008DRG_at | Hs.1869 | 1E−164 | 90.88937 | 99.78355 | Mm.2325 | 0 | 93.23144 | 99.1342 |
| (SEQ ID NO: 1687) | | | | Blast Report | | | | | | | | |
| WAN008EWS_at | 1.66113 | PLAA | Phospholipase A2-activating protein | WAN008EWS_at | Hs.27182 | 0 | 93.45133 | 100 | Mm.22724 | 0 | 93.45133 | 100 |
| (SEQ ID NO: 1688) | | | | Blast Report | | | | | | | | |
| WAN008DUZ_at | 1.538462 | POP7 | Processing of precursor 7, ribonuclease | WAN008DUZ_at | Hs.416994 | 6E−52 | 89.50276 | 35.21401 | Mm.290242 | 9E−62 | 91.71271 | 35.21401 |
| (SEQ ID NO: 1689) | | | P subunit (S. cerevisiae) | Blast Report | | | | | | | | |
| WAN0088X2_at | 3.322259 | PEO1 | Progressive external ophthalmoplegia 1 | WAN0088X2_at | Hs.22678 | 1E−141 | 88.65096 | 94.53441 | Mm.105585 | 7E−78 | 90.67797 | 47.77328 |
| (SEQ ID NO: 1593) | | | | Blast Report | | | | | | | | |
| WAN008CWW_at | 2.849003 | PHTF2 | Putative homeodomain transcription | WAN008CWW_at | Hs.203965 | 1E−12 | 86.2069 | 21.75 | Mm.86410 | 1E−17 | 86.86869 | 24.75 |
| (SEQ ID NO: 1690) | | | factor 2 | Blast Report | | | | | | | | |
| WAN008EY3_at | 1.652893 | 5430407P10 | RIKEN cDNA 5430407P10 gene | WAN008EY3_at | #N/A | 0.00005 | 85.48387 | 18.12865 | Mm.133542 | 1E−96 | 88.20059 | 99.12281 |
| (SEQ ID NO: 1691) | | Rik | | Blast Report | | | | | | | | |
| WAN008D6O_at | 1.672241 | Strbp | Spermatid perinuclear RNA binding | WAN008D6O_at | Hs.645506 | 9E−62 | 89.7561 | 67.65677 | Mm.237095 | 3E−94 | 95.34884 | 70.9571 |
| (SEQ ID NO: 1692) | | | protein | Blast Report | | | | | | | | |
| WAN008DXC_at | 2.816901 | TXNDC11 | Thioredoxin domain containing 11 | WAN008DXC_at | Hs.313847 | 0 | 94.0678 | 98.95178 | Mm.291015 | 0 | 94.54927 | 100 |
| (SEQ ID NO: 1693) | | | | Blast Report | | | | | | | | |
| WAN008DWJ_at | 3.636364 | USP1 | Ubiquitin specific peptidase 1 | WAN008DWJ_at | Hs.35086 | 0 | 92.94756 | 97.01754 | Mm.371692 | 0 | 94.90909 | 96.49123 |
| (SEQ ID NO: 1614) | | | | Blast Report | | | | | | | | |
| WAN013HVL_at | 1.760563 | UGDH | UDP-glucose dehydrogenase | WAN013HVL_at | Hs.572518 | 1E−165 | 90.06772 | 95.88745 | Mm.344831 | 1E−158 | 89.01099 | 98.48485 |
| (SEQ ID NO: 1639) | | | | Blast Report | | | | | | | | |
| WAN008CS2_at | 1.569859 | VKORC1L1 | Vitamin K epoxide reductase complex, | WAN008CS2_at | Hs.427232 | 1E−168 | 91.89189 | 96.73203 | Mm.288718 | 0 | 97.28507 | 96.2963 |
| (SEQ ID NO: 1694) | | | subunit 1-like 1 | Blast Report | | | | | | | | |
| X02950_at | 1.547988 | NA | X02950 Hamster alpha-A crystallin gene | X02950_at Blast | #N/A | 0 | 0 | 0 | #N/A | 5E−08 | 86.88525 | 10.87344 |
| (SEQ ID NO: 1695) | | | 5 part (exons 1-3) | Report | | | | | | | | |
| X56207_at | 1.531394 | NA | X56207 Hamster gene for myosin heavy | X56207_at Blast | #N/A | 0 | 0 | 0 | #N/A | 0.00005 | 92.10526 | 6.713781 |
| (SEQ ID NO: 1696) | | | chain, exons 1 & 2 | Report | | | | | | | | |
| WAN008DKJ_x_at | 1.54321 | Zfp297b | Zinc finger protein 297B | WAN008DKJ_x_at | #N/A | 1E−27 | 91.57895 | 90.47619 | Mm.44186 | 2E−24 | 89.69072 | 92.38095 |
| (SEQ ID NO: 1697) | | | | Blast Report | | | | | | | | |
| 1.5F Down | | | | | | | | | | | | |
| AB003732_f_at | 1.542 | NA | AB003732 Cricetulus griseus gene for | AB003732_f_at | #N/A | 2E−14 | 100 | 10.44776 | #N/A | 1E−35 | 88.96104 | 38.30846 |
| (SEQ ID NO: 1698) | | | polyubiquitin, complete cds. | Blast Report | | | | | | | | |
| WAN008EB0_at | 2.179 | ACOT7 | Acyl-CoA thioesterase 7 | WAN008EB0_at | Hs.126137 | 1E−49 | 88.64865 | 50.40872 | Mm.296191 | 3E−70 | 93.04813 | 50.95368 |
| (SEQ ID NO: 1699) | | | | Blast Report | | | | | | | | |
| AF284090_s_at | 1.508 | ADK | Adenosine kinase | AF284090_s_at | Hs.584739 | 2E−42 | 88.41463 | 98.79518 | Mm.188734 | 7E−63 | 93.37349 | 100 |
| (SEQ ID NO: 1700) | | | | Blast Report | | | | | | | | |
| AJ286821_at | 1.629 | NA | AJ286821 Mesocricetus auratus partial | AJ286821_at | #N/A | 0 | 0 | 0 | #N/A | 2E−22 | 85.82677 | 34.23181 |
| (SEQ ID NO: 1701) | | | mRNA for protein tyrosine phosphatase | Blast Report | | | | | | | | |
| | | | (ptp gene) | | | | | | | | | |
| WAN013I8B_at | 1.542 | AKR1A1 | Aldo-keto reductase family 1, member A1 | WAN013I8B_at | Hs.474584 | 1E−170 | 87.56567 | 97.94168 | #N/A | 0 | 91.53713 | 99.31389 |
| (SEQ ID NO: 1659) | | | (aldehyde reductase) | Blast Report | | | | | | | | |
| WAN013IAG_at | 6.5 | Areg | Amphiregulin | WAN013IAG_at | Hs.270833 | 2E−14 | 84.21053 | 25 | Mm.8039 | 3E−49 | 89.20455 | 38.59649 |
| (SEQ ID NO: 1702) | | | | Blast Report | | | | | | | | |
| WAN008DGD_at | 1.61 | Aplp2 | Amyloid beta (A4) precursor-like | WAN008DGD_at | Hs.370247 | 0 | 0 | 0 | Mm.19133 | 6E−69 | 93.08756 | 44.46721 |
| (SEQ ID NO: 1564) | | | protein 2 | Blast Report | | | | | | | | |
| WAN008EMP_at | 1.709 | CAP1 | CAP, adenylate cyclase-associated | WAN008EMP_at | Hs.370581 | 1E−56 | 93.40659 | 35.20309 | Mm.8687 | 1E−88 | 92.01389 | 55.706 |
| (SEQ ID NO: 1703) | | | protein 1 (yeast) | Blast Report | | | | | | | | |
| WAN013I0Y_at | 1.523 | CAPG | Capping protein (actin filament), gelsolin- | WAN013I0Y_at | Hs.516155 | 1E−112 | 87.1134 | 72.52336 | Mm.18626 | 1E−153 | 89.65517 | 81.30841 |
| (SEQ ID NO: 1704) | | | like | Blast Report | | | | | | | | |
| AF081141_at | 21.04 | CCL2 | Chemokine (C-C motif) ligand 2 | AF081141_at | Hs.303649 | 3E−13 | 90.625 | 13.41719 | Mm.290320 | 5E−41 | 91.04478 | 28.09224 |
| (SEQ ID NO: 1667) | | | | Blast Report | | | | | | | | |
| WAN013I8F_at | 2.19 | NA | Cluster includes AF308456 Cricetulus | WAN013I8F_at | #N/A | 0 | 0 | 0 | #N/A | 4E−07 | 91.80328 | 4.552239 |
| (SEQ ID NO: 1705) | | | griseus intracellular adhesion molecule 1 | Blast Report | | | | | | | | |
| | | | (ICAM1) mRNA, complete cds. | | | | | | | | | |
| WAN013I8Y_at | 1.528 | NA | Cluster includes M23159 Chinese | WAN013I8Y_at | #N/A | 0 | 84.15233 | 70.65972 | #N/A | 0 | 89.18919 | 70.65972 |
| (SEQ ID NO: 1706) | | | hamster DHFR-coamplified protein | Blast Report | | | | | | | | |
| | | | mRNA, partial cds, clone 2BE2121. | | | | | | | | | |
| WAN013HWP_x_at | 1.59 | NA | Cluster includes WAN008CUN 10602C- | WAN013HWP_x_at | #N/A | 0 | 0 | 0 | #N/A | 8E−76 | 92.82297 | 45.93407 |
| (SEQ ID NO: 1707) | | | E01 | Blast Report | | | | | | | | |
| WAN013HZK_at | 2.279 | NA | Cluster includes WAN008DS2 11228C- | WAN013HZK_at | #N/A | 0 | 0 | 0 | #N/A | 6E−10 | 88.37209 | 17.58691 |
| (SEQ ID NO: 1643) | | | H04 | Blast Report | | | | | | | | |
| WAN013I73_at | 1.564 | NA | Cluster includes X61958 C. longicaudatus | WAN013I73_at | #N/A | 0 | 0 | 0 | #N/A | 4E−45 | 88.54167 | 42.01313 |
| (SEQ ID NO: 1708) | | | mRNA for thrombin receptor | Blast Report | | | | | | | | |
| WAN008EHM_at | 2.033 | CLU | Clusterin | WAN008EHM_at | Hs.436657 | 1E−71 | 91.38756 | 36.60245 | Mm.200608 | 1E−91 | 90.74074 | 47.28546 |
| (SEQ ID NO: 1709) | | | | Blast Report | | | | | | | | |
| WAN013HWY_at | 1.658 | CCDC80 | Coiled-coil domain containing 80 | WAN013HWY_at | Hs.477128 | 6E−92 | 86.55914 | 76.07362 | Mm.181074 | 1E−171 | 90.57377 | 99.7955 |
| (SEQ ID NO: 1710) | | | | Blast Report | | | | | | | | |
| WAN008CST_at | 1.581 | COPS2 | COP9 constitutive photomorphogenic | WAN008CST_at | Hs.369614 | 0 | 94.16058 | 100 | Mm.3596 | 0 | 96.89781 | 100 |
| (SEQ ID NO: 1711) | | | homolog subunit 2 (Arabidopsis) | Blast Report | | | | | | | | |
| U71399_at | 1.593 | Cyb5 | Cytochrome b-5 | U71399_at Blast | #N/A | 4E−62 | 85.09934 | 60.4 | Mm.31018 | 1E−103 | 90.9396 | 59.6 |
| (SEQ ID NO: 1712) | | | | Report | | | | | | | | |
| WAN0088LE_at | 1.52 | DSTN | Destrin (actin depolymerizing factor) | WAN0088LE_at | Hs.304192 | 1E−169 | 90.38855 | 87.47764 | Mm.28919 | 0 | 93.04511 | 95.16995 |
| (SEQ ID NO: 1713) | | | | Blast Report | | | | | | | | |
| WAN008EAZ_at | 1.597 | DPP3 | Dipeptidyl-peptidase 3 | WAN008EAZ_at | Hs.502914 | 1E−161 | 90.9292 | 96.17021 | Mm.234769 | 0 | 94.68085 | 100 |
| (SEQ ID NO: 1714) | | | | Blast Report | | | | | | | | |
| WAN008CYZ_at | 1.929 | EFNB2 | Ephrin-B2 | WAN008CYZ_at | Hs.149239 | 2E−27 | 85.81081 | 25.69444 | Mm.209813 | 1E−102 | 89.6648 | 62.15278 |
| (SEQ ID NO: 1715) | | | | Blast Report | | | | | | | | |
| WAN013HYK_at | 3.18 | EPS8 | Epidermal growth factor receptor | WAN013HYK_at | Hs.591160 | 2E−15 | 89.28571 | 14.50777 | Mm.235346 | 2E−13 | 93.75 | 13.81693 |
| (SEQ ID NO: 1716) | | | pathway substrate 8 | Blast Report | | | | | | | | |
| AF046870_at | 1.536 | Efemp2 | Epidermal growth factor-containing | AF046870_at | #N/A | 0 | 88.50856 | 92.4642 | Mm.276367 | 0 | 91.79567 | 97.36247 |
| (SEQ ID NO: 1717) | | | fibulin-like extracellular matrix protein 2 | Blast Report | | | | | | | | |
| WAN013I3F_at | 1.816 | ETHE1 | Ethylmalonic encephalopathy 1 | WAN013I3F_at | Hs.7486 | 1E−111 | 84.33515 | 98.21109 | Mm.29553 | 0 | 90.87657 | 100 |
| (SEQ ID NO: 1718) | | | | Blast Report | | | | | | | | |
| WAN008EUG_at | 1.621 | EXOC6 | Exocyst complex component 6 | WAN008EUG_at | Hs.292097 | 2E−97 | 89.27445 | 96.06061 | Mm.24865 | 1E−124 | 93.44262 | 92.42424 |
| (SEQ ID NO: 1719) | | | | Blast Report | | | | | | | | |
| AF061256_at | 1.971 | FOLR1 | Folate receptor 1 (adult) | AF061256_at | Hs.73769 | 1E−124 | 83.96825 | 61.76471 | Mm.2135 | 0 | 89.23077 | 76.47059 |
| (SEQ ID NO: 1720) | | | | Blast Report | | | | | | | | |
| WAN008EMJ_at | 1.873 | GPC6 | Glypican 6 | WAN008EMJ_at | Hs.444329 | 7E−64 | 92.55319 | 37.4502 | Mm.234129 | 3E−58 | 90.37433 | 37.251 |
| (SEQ ID NO: 1721) | | | | Blast Report | | | | | | | | |
| WAN0088O4_at | 1.556 | IMPDH1 | IMP (inosine monophosphate) | WAN0088O4_at | Hs.534808 | 1E−170 | 91.64835 | 89.39096 | Mm.260707 | 0 | 91.28713 | 99.21415 |
| (SEQ ID NO: 1722) | | | dehydrogenase 1 | Blast Report | | | | | | | | |
| WAN013I3K_at | 1.872 | IDH1 | Isocitrate dehydrogenase 1 (NADP+), | WAN013I3K_at | Hs.11223 | 0 | 91.04478 | 99.44341 | Mm.9925 | 0 | 93.47015 | 99.44341 |
| (SEQ ID NO: 1723) | | | soluble | Blast Report | | | | | | | | |
| WAN008E63_at | 1.733 | JAK1 | Janus kinase 1 (a protein tyrosine kinase) | WAN008E63_at | Hs.207538 | 1E−142 | 89.83834 | 82.79159 | Mm.289657 | 0 | 94.53303 | 83.93881 |
| (SEQ ID NO: 1724) | | | | Blast Report | | | | | | | | |
| WAN008E9N_at | 1.542 | KLHL7 | Kelch-like 7 (Drosophila) | WAN008E9N_at | Hs.385861 | 1E−150 | 89.44223 | 99.40594 | #N/A | 0 | 93.11111 | 89.10891 |
| (SEQ ID NO: 1620) | | | | Blast Report | | | | | | | | |
| WAN008EZV_at | 1.777 | KIF1B | Kinesin family member 1B | WAN008EZV_at | Hs.97858 | 1E−176 | 89.38053 | 98.77622 | Mm.402393 | 1E−14 | 89.18919 | 12.93706 |
| (SEQ ID NO: 1725) | | | | Blast Report | | | | | | | | |
| AF093673_at | 1.703 | LLN | layilin | AF093673_at | #N/A | 1E−158 | 88.54962 | 38.67159 | #N/A | 1E−149 | 90.2439 | 33.28413 |
| (SEQ ID NO: 1726) | | | | Blast Report | | | | | | | | |
| M96676_at | 1.542 | LGALS1 | Lectin, galactoside-binding, soluble, 1 | M96676_at Blast | Hs.445351 | 1E−122 | 88.94472 | 100 | Mm.43831 | 1E−131 | 89.94975 | 100 |
| (SEQ ID NO: 1727) | | | (galectin 1) | Report | | | | | | | | |
| WAN008ERP_at | 1.673 | LEPREL1 | Leprecan-like 1 | WAN008ERP_at | Hs.374191 | 1E−45 | 87.12446 | 92.82869 | Mm.326869 | 1E−68 | 88.98305 | 94.0239 |
| (SEQ ID NO: 1634) | | | | Blast Report | | | | | | | | |
| WAN008EUO_at | 2.105 | LPL | Lipoprotein lipase | WAN008EUO_at | Hs.180878 | 2E−82 | 87.5 | 74.10926 | Mm.1514 | 1E−114 | 91.66667 | 74.10926 |
| (SEQ ID NO: 1635) | | | | Blast Report | | | | | | | | |
| L18986_at | 1.619 | LAMP1 | Lysosomal-associated membrane protein 1 | L18986_at Blast | Hs.494419 | 4E−58 | 85.66176 | 20.76336 | Mm.16716 | 1E−157 | 86.94915 | 45.03817 |
| (SEQ ID NO: 1501) | | | | Report | | | | | | | | |
| WAN013I8P_at | 1.818 | LAMP2 | Lysosomal-associated membrane protein 2 | WAN013I8P_at | Hs.496684 | 1E−133 | 86.23853 | 93.32192 | Mm.486 | 0 | 91.20287 | 95.37671 |
| (SEQ ID NO: 1728) | | | | Blast Report | | | | | | | | |
| AF306662_at | 2.002 | MMP14 | Matrix metallopeptidase 14 (membrane- | AF306662_at | Hs.2399 | 0 | 89.72603 | 99.82906 | Mm.280175 | 0 | 90.08547 | 100 |
| (SEQ ID NO: 1729) | | | inserted) | Blast Report | | | | | | | | |
| WAN008DBL_at | 1.568 | NDUFB9 | NADH dehydrogenase (ubiquinone) 1 | WAN008DBL_at | Hs.15977 | 1E−120 | 85.76923 | 93.86282 | Mm.322294 | 1E−180 | 90.67961 | 92.96029 |
| (SEQ ID NO: 1730) | | | beta subcomplex, 9, 22 kDa | Blast Report | | | | | | | | |
| WAN008BSC_at | 1.706 | NRD1 | Nardilysin (N-arginine dibasic | WAN008BSC_at | Hs.584782 | 1E−113 | 90.82569 | 60.78067 | Mm.274950 | 1E−131 | 93.00912 | 61.15242 |
| (SEQ ID NO: 1731) | | | convertase) | Blast Report | | | | | | | | |
| WAN013I62_at | 1.607 | ODC1 | Ornithine decarboxylase 1 | WAN013I62_at | Hs.467701 | 1E−178 | 85.99222 | 56.64952 | Mm.34102 | 0 | 91.76788 | 54.44526 |
| (SEQ ID NO: 1732) | | | | Blast Report | | | | | | | | |
| WAN008DXO_at | 2.241 | OSBPL9 | Oxysterol binding protein-like 9 | WAN008DXO_at | Hs.21938 | 0 | 92.9368 | 98.89706 | Mm.366315 | 0 | 93.93382 | 100 |
| (SEQ ID NO: 1733) | | | | Blast Report | | | | | | | | |
| AB014875_at | 1.787 | PLS3 | plastin 3 (T isoform) | AB014875_at | Hs.496622 | 1E−159 | 92 | 31.59851 | Mm.28777 | 1E−175 | 90.32847 | 40.74349 |
| (SEQ ID NO: 1734) | | | | Blast Report | | | | | | | | |
| AF221841_at | 1.564 | Mm.379870 | PREDICTED: Mus musculus similar to | AF221841_at | #N/A | 0 | 90.97889 | 100 | #N/A | 0 | 93.56725 | 98.46449 |
| (SEQ ID NO: 1735) | | | Peroxiredoxin 1 (Thioredoxin peroxidase | Blast Report | | | | | | | | |
| | | | 2) (Thioredoxin-dependent peroxide | | | | | | | | | |
| | | | reductase 2) (Osteoblast specific factor | | | | | | | | | |
| | | | 3) (OSF-3) (Macrophage 23 kDa stress | | | | | | | | | |
| | | | protein) (LOC545161), mRNA | | | | | | | | | |
| WAN008DSZ_at | 1.522 | PPP1R7 | Protein phosphatase 1, regulatory | WAN008DSZ_at | Hs.36587 | 1E−125 | 89.08189 | 100 | Mm.88704 | 1E−163 | 93.05211 | 100 |
| (SEQ ID NO: 1736) | | | subunit 7 | Blast Report | | | | | | | | |
| AB056121_at | 2.595 | S100B | S100 calcium binding protein, beta | AB056121_at | Hs.422181 | 6E−85 | 89.28571 | 83.58209 | Mm.235998 | 1E−108 | 90.14925 | 100 |
| (SEQ ID NO: 1737) | | | (neural) | Blast Report | | | | | | | | |
| WAN008DSW_at | 1.732 | STAT3 | Signal transducer and activator of | WAN008DSW_at | Hs.463059 | 0 | 91.91729 | 97.25777 | Mm.249934 | 0 | 94.11765 | 99.45155 |
| (SEQ ID NO: 1738) | | | transcription 3 (acute-phase response | Blast Report | | | | | | | | |
| | | | factor) | | | | | | | | | |
| WAN013I2Q_at | 1.694 | SSU72 | SSU72 RNA polymerase II CTD | WAN013I2Q_at | Hs.30026 | 1E−132 | 91.57303 | 71.91919 | Mm.294770 | 1E−171 | 91.47982 | 90.10101 |
| (SEQ ID NO: 1739) | | | phosphatase homolog (S. cerevisiae) | Blast Report | | | | | | | | |
| WAN008D44_at | 1.854 | SCP2 | Sterol carrier protein 2 | WAN008D44_at | Hs.476365 | 1E−115 | 89.53168 | 64.3617 | Mm.379011 | 1E−132 | 91.46006 | 64.3617 |
| (SEQ ID NO: 1740) | | | | Blast Report | | | | | | | | |
| WAN008EKU_at | 1.503 | TAX1BP1 | Tax1 (human T-cell leukemia virus type I) | WAN008EKU_at | Hs.34576 | 1E−120 | 89.5122 | 99.51456 | Mm.431979 | 0 | 0 | 0 |
| (SEQ ID NO: 1741) | | | binding protein 1 | Blast Report | | | | | | | | |
| WAN013I4X-at | 1.676 | Timp2 | Tissue inhibitor of metalloproteinase 2 | WAN013I4X_at | Hs.633514 | 0 | 0 | 0 | Mm.206505 | 0 | 94.2623 | 100 |
| (SEQ ID NO: 1742) | | | | Blast Report | | | | | | | | |
| AF113614_at | 1.823 | TLR2 | Toll-like receptor 2 | AF113614_at | Hs.519033 | 1E−101 | 86.26506 | 80.89669 | Mm.87596 | 1E−167 | 92.32558 | 83.82066 |
| (SEQ ID NO: 1668) | | | | Blast Report | | | | | | | | |
| WAN008DM2_at | 1.541 | TRAPPC3 | Trafficking protein particle complex 3 | WAN008DM2_at | Hs.523131 | 1E−129 | 93.18885 | 69.3133 | Mm.8392 | 1E−130 | 93.18885 | 69.3133 |
| (SEQ ID NO: 1743) | | | | Blast Report | | | | | | | | |
| WAN013I8T_at | 1.877 | Mm.392113 | Transcribed locus, moderately similar to | WAN013I8T_at | #N/A | 0 | 90.74941 | 79.66418 | #N/A | 0 | 94.36202 | 94.3097 |
| (SEQ ID NO: 1744) | | | XP_426592.1 PREDICTED: similar to | Blast Report | | | | | | | | |
| | | | tubulin, alpha 2; tubulin alpha 2 [Gallus | | | | | | | | | |
| | | | gallus] | | | | | | | | | |
| WAN0088TW_at | 1.618 | TCEB3 | Transcription elongation factor B (SIII), | WAN0088TW_at | Hs.584806 | 1E−173 | 89.36567 | 98.52941 | Mm.27663 | 0 | 93.09701 | 98.52941 |
| (SEQ ID NO: 1745) | | | polypeptide 3 (110 kDa, elongin A) | Blast Report | | | | | | | | |
| WAN008CZR_at | 1.522 | TMED1 | Transmembrane emp24 protein transport | WAN008CZR_at | Hs.515139 | 1E−139 | 87.57515 | 90.72727 | Mm.196618 | 0 | 94.89194 | 92.54545 |
| (SEQ ID NO: 1746) | | | domain containing 1 | Blast Report | | | | | | | | |
| WAN008D2L_at | 2.049 | TMEM50A | Transmembrane protein 50A | WAN008D2L_at | Hs.523054 | 2E−76 | 85.79882 | 80.09479 | Mm.88349 | 1E−63 | 86.92308 | 61.61137 |
| (SEQ ID NO: 1747) | | | | Blast Report | | | | | | | | |
| WAN013I4D_at | 2.02 | TAP2 | Transporter 2, ATP-binding cassette, | WAN013I4D_at | Hs.502 | 5E−33 | 83.25792 | 46.33124 | Mm.14814 | 1E−111 | 88.95028 | 75.89099 |
| (SEQ ID NO: 1532) | | | sub-family B (MDR/TAP) | Blast Report | | | | | | | | |
| U22818_at | 1.582 | NA | U22818 Cricetulus griseus SRD-2 mutant | U22818_at Blast | #N/A | 0 | 0 | 0 | #N/A | 1E−35 | 87.81726 | 15.91276 |
| (SEQ ID NO: 1748) | | | sterol regulatory element binding protein- | Report | | | | | | | | |
| | | | 2 (SREBP-2) mRNA, complete cds. | | | | | | | | | |
| AF004368_at | 1.618 | UGP2 | UDP-glucose pyrophosphorylase 2 | AF004368_at | Hs.516217 | 1E−116 | 91.77215 | 53.92491 | Mm.28877 | 1E−147 | 90.86538 | 70.98976 |
| (SEQ ID NO: 1749) | | | | Blast Report | | | | | | | | |
| WAN008D7G_at | 1.52 | VAMP3 | Vesicle-associated membrane protein 3 | WAN008D7G_at | Hs.66708 | 4E−07 | 97.56098 | 7.400722 | Mm.273930 | 9E−19 | 91.86047 | 15.52347 |
| (SEQ ID NO: 1750) | | | (cellubrevin) | Blast Report | | | | | | | | |
| WAN013HVO_at | 1.541 | YBX1 | Y box binding protein 1 | WAN013HVO_at | Hs.473583 | 0 | 93.86139 | 99.40945 | Mm.258204 | 0 | 95.54455 | 99.40945 |
| (SEQ ID NO: 1751) | | | | Blast Report | | | | | | | | |

### Example 9

### Genes Differentially Expressed in Cells with Sustained High Cell Viability

[0146] Bcl-xL is a powerful inhibitor of cell death. Cells overpressing Bcl-xL demonstrate sustained high cell viability. Tables 18 and 19 summarize nucleic acids that are differentially expressed by a factor of at least 1.2 in cells overexpressing Bcl-xL. Samples were taken at multiple time points for comparison. Table 18 summarizes nucleic acids that are differentially expressed by a factor of at least 1.2 at day 5. Table 19 summarizes nucleic acids that are differentially expressed by a factor of at least 1.2 at a stage later than day 5.

TABLE 18
d5 comparison

| | Fold | | | | |
|---|---|---|---|---|---|
| Qualifier List | Change | Symbol | Title | Human Unigene ID | eValue |
| DOWN (Originally | | | | | |
| 173) | | | | | |
| WAN008DUG_at | 1.582 | Hibadh | 3-hydroxyisobutyrate | WAN008DUG_at Blast | Hs.406758 |
| (SEQ ID NO: 1752) | | | dehydrogenase | Report | |
| WAN008EB0_at | 1.796 | ACOT7 | Acyl-CoA thioesterase 7 | WAN008EB0_at Blast | Hs.126137 |
| (SEQ ID NO: 1699) | | | | Report | |
| WAN008CT8_at | 1.533 | AP2M1 | Adaptor-related protein | WAN008CT8_at Blast | Hs.518460 |
| (SEQ ID NO: 1522) | | | complex 2, mu 1 subunit | Report | |
| AF120325_x_at | 2.101 | NA | AF120325 Cricetutus | AF120325_x_at Blast | #N/A |
| (SEQ ID NO: 1753) | | | griseus class I beta tubulin | Report | |
| | | | gene, complete cds. | | |
| WAN008EKP_at | 1.752 | ATP5B | ATP synthase, H+ | WAN008EKP_at Blast | Hs.406510 |
| (SEQ ID NO: 1754) | | | transporting, mitochondrial | Report | |
| | | | F1 complex, beta | | |
| | | | polypeptide | | |
| WAN008F20_x_at | 1.544 | BCCIP | BRCA2 and CDKN1A | WAN008F20_x_at Blast | Hs.370292 |
| (SEQ ID NO: 1755) | | | interacting protein | Report | |
| WAN008DPO_at | 1.638 | BTBD1 | BTB (POZ) domain | WAN008DPO_at Blast | Hs.459149 |
| (SEQ ID NO: 1756) | | | containing 1 | Report | |
| WAN013I3P_at | 1.804 | CAMLG | Calcium modulating ligand | WAN01313P_at Blast | Hs.529846 |
| (SEQ ID NO: 1653) | | | Report | | |
| WAN008DSX_at | 3.055 | CALM1 | Calmodulin 1 | WAN008DSX_at Blast | Hs.282410 |
| (SEQ ID NO: 1757) | | | (phosphorylase kinase, | Report | |
| | | | delta) | | |
| WAN013HVK_at | 1.581 | Arpp19 | CAMP-regulated | WAN013HVK_at Blast | #N/A |
| (SEQ ID NO: 1758) | | | phosphoprotein 19 | Report | |
| WAN008ECX_at | 1.628 | Cd151 | CD151 antigen | WAN008ECX_at Blast | #N/A |
| (SEQ ID NO: 1759) | | | | Report | |
| WAN008D27_at | 1.57 | CLTA | Clathrin, light polypeptide | WAN008D27_at Blast | Hs.522114 |
| (SEQ ID NO: 1760) | | | (Lca) | Report | |
| WAN008DS9_at | 1.583 | CFL2 | Cofilin 2 (muscle) | WAN008DS9_at Blast | Hs.180141 |
| (SEQ ID NO: 1613) | | | | Report | |
| AF022941_x_at | 2.041 | Cirbp | Cold inducible RNA binding | AF022941_x_at Blast | Hs.634522 |
| (SEQ ID NO: 1761) | | | protein | Report | |
| WAN008EEB_at | 1.779 | CORO1B | Coronin, actin binding | WAN008EEB_at Blast | Hs.6191 |
| (SEQ ID NO: 1762) | | | protein, 1B | Report | |
| WAN0088J2_at | 1.63 | CUEDC2 | CUE domain containing 2 | WAN0088J2_at Blast | Hs.500874 |
| (SEQ ID NO: 1763) | | | | Report | |
| WAN0088PY_at | 1.609 | Ddx5 | DEAD (Asp-Glu-Ala-Asp) | WAN0088PY_at Blast | Hs.279806 |
| (SEQ ID NO: 1480) | | | box polypeptide 5 | Report | |
| WAN013I1H_at | 1.601 | D19Bwg1357e | DNA segment Chr 19, | WAN013I1H_at Blast | #N/A |
| (SEQ ID NO: 1764) | | | Brigham & Women's | Report | |
| | | | Genetics 1357 expressed | | |
| WAN008DVF_at | 1.509 | DNAJC7 | DnaJ (Hsp40) homolog, | WAN008DVF_at Blast | Hs.500156 |
| (SEQ ID NO: 1765) | | | subfamily C, member 7 | Report | |
| WAN013I3F_at | 1.544 | ETHE1 | Ethylmalonic | WAN013I3F_at Blast | Hs.7486 |
| (SEQ ID NO: 1718) | | | encephalopathy 1 | Report | |
| WAN013HZ5_at | 1.592 | EIF2S2 | Eukaryotic translation | WAN013HZ5_at Blast | Hs.429180 |
| (SEQ ID NO: 1766) | | | initiation factor 2, subunit 2 | Report | |
| | | | beta, 38 kDa | | |
| WAN008E8R_at | 1.522 | EIF3S1 | Eukaryotic translation | WAN008E8R_at Blast | Hs.404056 |
| (SEQ ID NO: 1767) | | | initiation factor 3, subunit 1 | Report | |
| | | | alpha, 35 kDa | | |
| WAN013HZP_at | 1.532 | Eif4g2 | Eukaryotic translation | WAN013HZP_at Blast | Hs.183684 |
| (SEQ ID NO: 1644) | | | initiation factor 4, gamma 2 | Report | |
| WAN013IA4_at | 1.97 | ETF1 | Eukaryotic translation | WAN013IA4_at Blast | Hs.483494 |
| (SEQ ID NO: 1768) | | | termination factor 1 | Report | |
| WAN008E82_at | 1.522 | Fbxl11 | F-box and leucine-rich | WAN008E82_at Blast | Hs.124147 |
| (SEQ ID NO: 1769) | | | repeat protein 11 | Report | |
| D43757_at | 1.581 | FGA | Fibrinogen alpha chain | D43757_at Blast Report | Hs.351593 |
| (SEQ ID NO: 1770) | | | | | |
| WAN008E72_x_at | 2.339 | GDI2 | GDP dissociation inhibitor 2 | WAN008E72_x_at Blast | Hs.299055 |
| (SEQ ID NO: 1547) | | | | Report | |
| WAN008EXR_at | 1.574 | GPI | Glucose phosphate | WAN008EXR_at Blast | Hs.466471 |
| (SEQ ID NO: 1771) | | | isomerase | Report | |
| WAN008EQH_at | 1.813 | GLUD1 | Glutamate dehydrogenase 1 | WAN008EQH_at Blast | Hs.500409 |
| (SEQ ID NO: 1772) | | | | Report | |
| WAN008BR0_at | 1.564 | GOT2 | Glutamic-oxaloacetic | WAN008BR0_at Blast | Hs.599470 |
| (SEQ ID NO: 1773) | | | transaminase 2, | Report | |
| | | | mitochondrial (aspartate | | |
| | | | aminotransferase 2) | | |
| WAN008CFZ_at | 1.601 | HSBP1 | Heat shock factor binding | WAN008CFZ_at Blast | Hs.250899 |
| (SEQ ID NO: 1774) | | | protein 1 | Report | |
| WAN013I1P_at | 1.587 | HNRPA2B1 | Heterogeneous nuclear | WAN013I1P_at Blast | Hs.487774 |
| (SEQ ID NO: 1492) | | | ribonucleoprotein A2/B1 | Report | |
| Y00365_at | 1.895 | HMGB1 | High-mobility group box 1 | Y00365_at Blast Report | Hs.434102 |
| (SEQ ID NO: 1674) | | | | | |
| WAN008EKL_at | 1.512 | HBP1 | HMG-box transcription | WAN008EKL_at Blast | Hs.162032 |
| (SEQ ID NO: 1775) | | | factor 1 | Report | |
| WAN013I8N_at | 1.709 | IMPDH2 | IMP (inosine | WAN013I8N_at Blast | Hs.476231 |
| (SEQ ID NO: 1776) | | | monophosphate) | Report | |
| | | | dehydrogenase 2 | | |
| WAN0088O9_at | 2.845 | Itgb1 | Integrin beta 1 (fibronectin | WAN0088O9_at Blast | Hs.295626 |
| (SEQ ID NO: 1777) | | | receptor beta) | Report | |
| AF180918_at | 1.742 | KLHL5 | Kelch-like 5 (Drosophila) | AF180918_at Blast Report | Hs.272251 |
| (SEQ ID NO: 1778) | | | | | |
| WAN008E26_x_at | 2.466 | KLHL7 | Kelch-like 7 (Drosophila) | WAN008E26_x_at Blast | Hs.385861 |
| (SEQ ID NO: 1779) | | | | Report | |
| WAN008BNG_at | 1.568 | LRRC28 | Leucine rich repeat | WAN008BNG_at Blast | Hs.578684 |
| (SEQ ID NO: 1780) | | | containing 28 | Report | |
| WAN008EKF_at | 1.623 | Lass2 | Longevity assurance | WAN008EKF_at Blast | Hs.643565 |
| (SEQ ID NO: 1781) | | | homolog 2 (S. cerevisiae) | Report | |
| L18986_at | 1.584 | LAMP1 | Lysosomal-associated | L18986_at Blast Report | Hs.494419 |
| (SEQ ID NO: 1501) | | | membrane protein 1 | | |
| WAN008F1L_at | 1.676 | Mxi1 | Max interacting protein 1 | WAN008F1L_at Blast | Hs.501023 |
| (SEQ ID NO: 1782) | | | | Report | |
| WAN008ESO_at | 1.757 | MPP6 | Membrane protein, | WAN008ESO_at Blast | Hs.533355 |
| (SEQ ID NO: 1783) | | | palmitoylated 6 (MAGUK | Report | |
| | | | P55 subfamily member 6) | | |
| J00061_at | 1.861 | MT1 | metallothionein I | J00061_at Blast Report | #N/A |
| (SEQ ID NO: 1784) | | | | | |
| X79864_at | 1.741 | MRPL12 | Mitochondrial ribosomal | X79864_at Blast Report | Hs.109059 |
| (SEQ ID NO: 1785) | | | protein L12 | | |
| WAN008E43_at | 1.583 | MRPL30 | Mitochondrial ribosomal | WAN008E43_at Blast | Hs.590896 |
| (SEQ ID NO: 1786) | | | protein L30 | Report | |
| WAN008DKS_at | 1.615 | MAPK8IP1 | Mitogen-activated protein | WAN008DKS_at Blast | Hs.234249 |
| (SEQ ID NO: 1787) | | | kinase 8 interacting protein 1 | Report | |
| WAN008CQE_at | 1.747 | NDUFB6 | NADH dehydrogenase | WAN008CQE_at Blast | Hs.493668 |
| (SEQ ID NO: 1788) | | | (ubiquinone) 1 beta | Report | |
| | | | subcomplex, 6, 17 kDa | | |
| WAN008EE0_x_at | 1.671 | NDUFS1 | NADH dehydrogenase | WAN008EE0_x_at Blast | Hs.471207 |
| (SEQ ID NO: 1789) | | | (ubiquinone) Fe—S protein 1, | Report | |
| | | | 75 kDa (NADH-coenzyme Q | | |
| | | | redactase) | | |
| WAN013I17_at | 2.237 | NID1 | Nidogen 1 | WAN013I17_at Blast | Hs.356624 |
| (SEQ ID NO: 1790) | | | | Report | |
| WAN008BNY_at | 1.61 | NSMCE1 | Non-SMC element 1 | WAN008BNY_at Blast | Hs.284295 |
| (SEQ ID NO: 1791) | | | homolog (S. cerevisiae) | Report | |
| WAN0088KK_x_at | 1.779 | Nfe2I2 | Nuclear factor, erythroid | WAN0088KK_x_at Blast | Hs.155396 |
| (SEQ ID NO: 1792) | | | derived 2, like 2 | Report | |
| WAN013I62_at | 1.843 | ODC1 | Ornithine decarboxylase 1 | WAN013I62_at Blast | Hs.467701 |
| (SEQ ID NO: 1732) | | | | Report | |
| WAN013I2X_at | 2.366 | PPIG | Peptidylprolyl isomerase G | WAN013I2X_at Blast | Hs.470544 |
| (SEQ ID NO: 1793) | | | (cyclophilin G) | Report | |
| AB041733_at | 1.693 | PEX12 | Peroxisomal biogenesis | AB041733_at Blast Report | Hs.591190 |
| (SEQ ID NO: 1794) | | | factor 12 | | |
| WAN008DUC_at | 1.657 | PHF14 | PHD finger protein 14 | WAN008DUC_at Blast | Hs.159918 |
| (SEQ ID NO: 1795) | | | | Report | |
| AB004109_at | 2.124 | PTDSS2 | Phosphatidylserine | AB004109_at Blast Report | Hs.12851 |
| (SEQ ID NO: 1796) | | | synthase 2 | | |
| WAN0088ZP_at | 1.519 | Pawr | PRKC, apoptosis, WT1, | WAN0088ZP_at Blast | Hs.643130 |
| (SEQ ID NO: 1482) | | | regulator | Report | |
| WAN008E7A_at | 1.93 | PGRMC1 | Progesterone receptor | WAN008E7A_at Blast | Hs.90061 |
| (SEQ ID NO: 1797) | | | membrane component 1 | Report | |
| WAN0088KG_at | 1.642 | PPGB | Protective protein for beta- | WAN0088KG_at Blast | Hs.517076 |
| (SEQ ID NO: 1539) | | | galactosidase | Report | |
| | | | (galactosialidosis) | | |
| WAN0088XS_at | 1.678 | PKN2 | Protein kinase N2 | WAN0088XS_at Blast | Hs.440833 |
| (SEQ ID NO: 1798) | | | | Report | |
| WAN0088YU_at | 1.556 | PPP4C | Protein phosphatase 4 | WAN0088YU_at Blast | Hs.534338 |
| (SEQ ID NO: 1799) | | | (formerly X), catalytic | Report | |
| | | | subunit | | |
| WAN0088X9_at | 1.501 | RAB34 | RAB34, member RAS | WAN0088X9_at Blast | Hs.301853 |
| (SEQ ID NO: 1553) | | | oncogene family | Report | |
| WAN008CLK_at | 1.56 | RAB6A | RAB6A, member RAS | WAN008CLK_at Blast | Hs.12152 |
| (SEQ ID NO: 1552) | | | oncogene family | Report | |
| AB015640_at | 1.554 | RANBP9 | RAN binding protein 9 | AB015640_at Blast Report | Hs.306242 |
| (SEQ ID NO: 1800) | | | | | |
| WAN013HVD_at | 1.569 | RHOA | Ras homolog gene family, | WAN013HVD_at Blast | Hs.247077 |
| (SEQ ID NO: 1801) | | | member A | Report | |
| WAN008DRK_at | 1.738 | RFC4 | Replication factor C | WAN008DRK_at Blast | Hs.591322 |
| (SEQ ID NO: 1802) | | | (activator 1) 4, 37 kDa | Report | |
| WAN008DWV_x_at | 1.717 | Rmnd5a | Required for meiotic nuclear | WAN008DWV_x_at Blast | Hs.75277 |
| (SEQ ID NO: 1803) | | | division 5 homotog A | Report | |
| | | | (S. cerevisiae) | | |
| WAN013I1O_at | 1.543 | RNH1 | Ribonuclease/angiogenin | WAN013I1O_at Blast | Hs.530687 |
| (SEQ ID NO: 1804) | | | inhibitor 1 | Report | |
| WAN008DC4_at | 2.743 | Rpl14 | Ribosomal protein L14 | WAN008DC4_at Blast | Hs.446522 |
| (SEQ ID NO: 1805) | | | | Report | |
| WAN013I36_f_at | 1.889 | RPSA | Ribosomal protein SA | WAN013I36_f_at Blast | Hs.449909 |
| (SEQ ID NO: 1806) | | | | Report | |
| WAN008CKA_at | 1.518 | 1110002B05Rik | RIKEN cDNA 1110002B05 | WAN008CKA_at Blast | #N/A |
| (SEQ ID NO: 1807) | | | gene | Report | |
| WAN008EQG_at | 1.678 | SAPS3 | SAPS domain family, | WAN008EQG_at Blast | Hs.503022 |
| (SEQ ID NO: 1808) | | | member 3 | Report | |
| AF004831_at | 1.999 | SPTLC1 | Serine palmitoyltransferase, | AF004831_at Blast Report | Hs.90458 |
| (SEQ ID NO: 1536) | | | long chain base subunit 1 | | |
| WAN008EE3_at | 1.521 | SARS | Seryl-tRNA synthetase | WAN008EE3_at Blast | Hs.531176 |
| (SEQ ID NO: 1809) | | | | Report | |
| WAN0088TG_at | 1.997 | SRP72 | Signal recognition particle | WAN0088TG_at Blast | Hs.237825 |
| (SEQ ID NO: 1540) | | | 72 kDa | Report | |
| S79122_x_at | 2.103 | SON | SON DNA binding protein | S79122_x_at Blast Report | Hs.517262 |
| (SEQ ID NO: 1810) | | | | | |
| WAN008EFY_at | 1.597 | SPG21 | Spastic paraplegia 21 | WAN008EFY_at Blast | Hs.242458 |
| (SEQ ID NO: 1811) | | | (autosomal recessive, Mast | Report | |
| | | | syndrome) | | |
| WAN008CSS_at | 1.546 | SART1 | Squamous cell carcinoma | WAN008CSS_at Blast | Hs.502883 |
| (SEQ ID NO: 1812) | | | antigen recognised by T | Report | |
| | | | cells | | |
| AF039202_at | 1.603 | STIP1 | Stress-induced- | AF039202_at Blast Report | Hs.337295 |
| (SEQ ID NO: 1813) | | | phosphoprotein 1 | | |
| | | | (Hsp70/Hsp90-organizing | | |
| | | | protein) | | |
| WAN013I25_at | 1.88 | Stx4a | Syntaxin 4A (placental) | WAN013I25_at Blast | #N/A |
| (SEQ ID NO: 1814) | | | | Report | |
| WAN013HX6_at | 1.998 | TAX1BP1 | Tax1 (human T-cell | WAN013HX6_at Blast | Hs.34576 |
| (SEQ ID NO: 1815) | | | leukemia virus type I) | Report | |
| | | | binding protein 1 | | |
| WAN0088ST_at | 1.521 | TBC1D15 | TBC1 domain family, | WAN0088ST_at Blast | Hs.284630 |
| (SEQ ID NO: 1816) | | | member 15 | Report | |
| WAN008D32_at | 1.687 | TSPAN6 | Tetraspanin 6 | WAN008D32_at Blast | Hs.43233 |
| (SEQ ID NO: 1817) | | | | Report | |
| WAN013I98_at | 1.517 | TST | Thiosulfate sulfurtransferase | WAN013I98_at Blast | Hs.474783 |
| (SEQ ID NO: 1818) | | | (rhodanese) | Report | |
| WAN013HUQ_x_at | 1.674 | THOC5 | THO complex 5 | WAN013HUQ_x_at Blast | Hs.75361 |
| (SEQ ID NO: 1819) | | | | Report | |
| L00365_at | 1.673 | TK1 | Thymidine kinase 1, soluble | L00365_at Blast Report | Hs.515122 |
| (SEQ ID NO: 1820) | | | | | |
| WAN008EKQ_at | 1.528 | TIAL1 | TIA1 cytotoxic granule- | WAN008EKQ_at Blast | Hs.501203 |
| (SEQ ID NO: 1821) | | | associated RNA binding | Report | |
| | | | protein-like 1 | | |
| WAN013I4X_at | 1.957 | Timp2 | Tissue inhibitor of | WAN013I4X_at Blast | Hs.633514 |
| (SEQ ID NO: 1742) | | | metalloproteinase 2 | Report | |
| WAN013IA5_at | 1.626 | TOP2B | Topoisomerase (DNA) II | WAN013IA5_at Blast | Hs.475733 |
| (SEQ ID NO: 1822) | | | beta 180 kDa | Report | |
| WAN0088TW_at | 1.537 | TCEB3 | Transcription elongation | WAN0088TW_at Blast | Hs.584806 |
| (SEQ ID NO: 1745) | | | factor B (SIII), polypeptide 3 | Report | |
| | | | (110 kDa, elongin A) | | |
| WAN008DE8_at | 1.553 | TIMM23 | Translocase of inner | WAN008DE8_at Blast | Hs.524308 |
| (SEQ ID NO: 1823) | | | mitochondrial membrane 23 | Report | |
| | | | homolog (yeast) | | |
| WAN008CSZ_at | 1.896 | Tloc1 | Translocation protein 1 | WAN008CSZ_at Blast | Hs.592561 |
| (SEQ ID NO: 1824) | | | | Report | |
| WAN008EFO_at | 1.59 | TM9SF2 | Transmembrane 9 | WAN008EFO_at Blast | Hs.130413 |
| (SEQ ID NO: 1825) | | | superfamily member 2 | Report | |
| WAN008D2L_at | 1.6 | TMEM50A | Transmembrane protein | WAN008D2L_at Blast | Hs.523054 |
| (SEQ ID NO: 1747) | | | 50A | Report | |
| U29167_at | 1.592 | TPM2 | Tropomyosin 2 (beta) | U29167_at Blast Report | Hs.300772 |
| (SEQ ID NO: 1672) | | | | | |
| WAN013IAB_x_at | 1.578 | TP53 | Tumor protein p53 (Li- | WAN013IAB_x_at Blast | Hs.408312 |
| (SEQ ID NO: 1496) | | | Fraumeni syndrome) | Report | |
| WAN008EUV_x_at | 2.038 | Tpt1 | Tumor protein, | WAN008EUV_x_at Blast | Hs.374596 |
| (SEQ ID NO: 1826) | | | translationally-controlled 1 | Report | |
| WAN008E9O_at | 2.17 | TSG101 | Tumor susceptibility gene | WAN008E9O_at Blast | Hs.523512 |
| (SEQ ID NO: 1827) | | | 101 | Report | |
| WAN008DK3_at | 1.574 | YWHAQ | Tyrosine 3- | WAN008DK3_at Blast | Hs.74405 |
| (SEQ ID NO: 1828) | | | monooxygenase/tryptophan | Report | |
| | | | 5-monooxygenase | | |
| | | | activation protein, theta | | |
| | | | polypeptide | | |
| WAN008DK1_at | 1.778 | UQCRC1 | Ubiquinol-cytochrome c | WAN008DK1_at Blast | Hs.119251 |
| (SEQ ID NO: 1829) | | | reductase core protein I | Report | |
| AF004368_at | 1.703 | UGP2 | UDP-glucose | AF004368_at Blast Report | Hs.516217 |
| (SEQ ID NO: 1749) | | | pyrophosphorylase 2 | | |
| WAN008D7G_at | 1.595 | VAMP3 | Vesicle-associated | WAN008D7G_at Blast | Hs.66708 |
| (SEQ ID NO: 1750) | | | membrane protein 3 | Report | |
| | | | (cellubrevin) | | |
| WAN013I7T_at | 1.691 | HRAS | V-Ha-ras Harvey rat | WAN013I7T_at Blast | Hs.37003 |
| (SEQ ID NO: 1830) | | | sarcoma viral oncogene | Report | |
| | | | homolog | | |
| X63416_at | 1.675 | MOS | V-mos Moloney murine | X63416_at Blast Report | Hs.533432 |
| (SEQ ID NO: 1831) | | | sarcoma viral oncogene | | |
| | | | homolog | | |
| S74024_at | 1.772 | XPA | Xeroderma pigmentosum, | S74024_at Blast Report | Hs.591907 |
| (SEQ ID NO: 1832) | | | complementation group A | | |
| WAN008906_at | 1.532 | Zfp259 | Zinc finger protein 259 | WAN008906_at Blast | #N/A |
| (SEQ ID NO: 1833) | | | | Report | |
| WAN008CO7_at | 1.701 | Zfp622 | Zinc finger protein 622 | WAN008CO7_at Blast | #N/A |
| (SEQ ID NO: 1834) | | | | Report | |
| UP (Originally 78) | | | | | |
| L00178_at | 1.828153565 | Hmgcr | 3-hydroxy-3-methylglutaryl- | Hs.643495 | 3E−47 |
| (SEQ ID NO: 1507) | | | Coenzyme A reductase | | |
| L00327_x_at | 2.475247525 | HMGCS1 | 3-hydroxy-3-methylglutaryl- | Hs.397729 | 8E−51 |
| (SEQ ID NO: 1835) | | | Coenzyme A synthase 1 | | |
| | | | (soluble) | | |
| WAN013HXI_at | 1.538461538 | ACAT2 | Acetyl-Coenzyme A | Hs.571037 | 1E−122 |
| (SEQ ID NO: 1836) | | | acetyltransferase 2 | | |
| | | | (acetoacetyl Coenzyme A | | |
| | | | thiolase) | | |
| AF022944_at | 1.834862385 | NA | AF022944 Cricetulus | #N/A | 1E−34 |
| (SEQ ID NO: 1837) | | | griseus DNA damage | | |
| | | | inducible clone similar to | | |
| | | | eukaryotic initiation factor 5 | | |
| | | | (eIF-5) cDNA, partial | | |
| | | | sequence. | | |
| WAN013HTZ_at | 4.464285714 | BCL2L1 | BCL2-like 1 | Hs.516966 | 0 |
| (SEQ ID NO: 1838) | | | | | |
| WAN008CI5_at | 1.550387597 | CDC20 | CDC20 cell division cycle 20 | Hs.524947 | 1E−105 |
| (SEQ ID NO: 1839) | | | homolog (S. cerevisiae) | | |
| M29895_at | 1.508295626 | CHI3L1 | Chitinase 3-like 1 (cartilage | Hs.382202 | 5E−26 |
| (SEQ ID NO: 1840) | | | glycoprotein-39) | | |
| X81405_at | 1.552795031 | EN2 | Engrailed homolog 2 | Hs.134989 | 5E−69 |
| (SEQ ID NO: 1682) | | | | | |
| D11452_at | 1.503759398 | GIP | Gastric inhibitory | Hs.1454 | 3E−35 |
| (SEQ ID NO: 1841) | | | polypeptide | | |
| WAN013I0X_at | 2.008032129 | GSS | Glutathione synthetase | Hs.82327 | 1E−98 |
| (SEQ ID NO: 1581) | | | | | |
| WAN008F1C_x_at | 1.706484642 | GSK3A | Glycogen synthase kinase 3 | Hs.466828 | 2E−16 |
| (SEQ ID NO: 1842) | | | alpha | | |
| WAN0088K7_x_at | 3.558718861 | Hspa5 | Heat shock 70 kD protein 5 | Hs.605502 | 0 |
| (SEQ ID NO: 1506) | | | (glucose-regulated protein) | | |
| WAN013HWO_x_at | 2.141327623 | HSP90B1 | Heat shock protein 90 kDa | Hs.192374 | 2E−48 |
| (SEQ ID NO: 1529) | | | beta (Grp94), member 1 | | |
| L38710_x_at | 1.697792869 | HSD3B1 | Hydroxy-delta-5-steroid | Hs.364941 | 2E−41 |
| (SEQ ID NO: 1843) | | | dehydrogenase, 3 beta- and | | |
| | | | steroid delta-isomerase 1 | | |
| WAN013I9D_at | 1.582278481 | HYOU1 | Hypoxia up-regulated 1 | Hs.277704 | 4E−72 |
| (SEQ ID NO: 1525) | | | | | |
| D89285_at | 1.677852349 | ITIH1 | Inter-alpha (globulin) | Hs.420257 | 2E−80 |
| (SEQ ID NO: 1844) | | | inhibitor H1 | | |
| WAN0088SX_x_at | 1.76366843 | MGEA5 | Meningioma expressed | Hs.500842 | 0.00006 |
| (SEQ ID NO: 1845) | | | antigen 5 (hyaluronidase) | | |
| AB028638_at | 1.680672269 | PDGFB | Platelet-derived growth | Hs.1976 | 4E−68 |
| (SEQ ID NO: 1846) | | | factor beta polypeptide | | |
| | | | (simian sarcoma viral (v-sis) | | |
| | | | oncogene homolog) | | |
| WAN008CWW_at | 1.703577513 | PHTF2 | Putative homeodomain | Hs.203965 | 1E−12 |
| (SEQ ID NO: 1690) | | | transcription factor 2 | | |
| WAN008EIS_at | 1.782531194 | RORB | RAR-related orphan | Hs.494178 | 0 |
| (SEQ ID NO: 1847) | | | receptor B | | |
| WAN008DXF_x_at | 1.623376623 | SENP5 | SUMO1/sentrin specific | Hs.240770 | 1E−33 |
| (SEQ ID NO: 1848) | | | peptidase 5 | | |
| WAN008D13_at | 1.642036125 | TXNRD1 | Thioredoxin reductase 1 | Hs.567352 | 2E−91 |
| (SEQ ID NO: 1849) | | | | | |
| AF022945-rc_f_at | 2.577319588 | Thbd | Thrombomodulin | Hs.2030 | 0 |
| (SEQ ID NO: 1666) | | | | | |
| L22614_at | 1.798561151 | THBS1 | Thrombospondin 1 | Hs.164226 | 3E−62 |
| (SEQ ID NO: 1850) | | | | | |
| L19142_f_at | 2.222222222 | TFRC | Transferrin receptor (p90, | Hs.529618 | 1E−106 |
| (SEQ ID NO: 1851) | | | CD71) | | |
| AY012002_at | 1.703577513 | TYR | Tyrosinase (oculocutaneous | Hs.503555 | 1E−83 |
| (SEQ ID NO: 1852) | | | albinism IA) | | |
| WAN0088P2_at | 1.519756839 | UAP1 | UDP-N-acteylglucosamine | Hs.492859 | 1E−130 |
| (SEQ ID NO: 1853) | | | pyrophosphorylase 1 | | |
| AF271265_at | 1.62601626 | UCP3 | Uncoupling protein 3 | Hs.101337 | 3E−69 |
| (SEQ ID NO: 1854) | | | (mitochondrial, proton | | |
| | | | carrier) | | |
| WAN008ERE_x_at | 1.788908766 | WDR67 | WD repeat domain 67 | Hs.492716 | 9E−36 |
| (SEQ ID NO: 1855) | | | | | |

| | | | Mouse | | | | |
|---|---|---|---|---|---|---|---|
| Qualifier List | % ID | % QC | Unigene ID | eValue | % ID | % QC | |
| DOWN (Originally | | | | | | | |
| 173) | | | | | | | |
| WAN008DUG_at | 0.00000002 | 90.78947 | 13.74322 | Mm.286458 | 3E−43 | 91.55844 | 27.8481 |
| (SEQ ID NO: 1752) | | | | | | | |
| WAN008EB0_at | 1E−49 | 88.64865 | 50.40872 | Mm.296191 | 3E−70 | 93.04813 | 50.95368 |
| (SEQ ID NO: 1699) | | | | | | | |
| WAN008CT8_at | 0 | 94.38445 | 80.80279 | Mm.18946 | 0 | 95.48387 | 81.15183 |
| (SEQ ID NO: 1522) | | | | | | | |
| AF120325_x_at | 0 | 87.58085 | 83.83948 | #N/A | 0 | 91.625 | 86.7679 |
| (SEQ ID NO: 1753) | | | | | | | |
| WAN008EKP_at | 0 | 93.25397 | 99.80198 | Mm.238973 | 0 | 93.2 | 99.0099 |
| (SEQ ID NO: 1754) | | | | | | | |
| WAN008F20_x_at | 1E−26 | 85.31073 | 81.56682 | Mm.389983 | 5E−21 | 89.77273 | 40.553 |
| (SEQ ID NO: 1755) | | | | | | | |
| WAN008DPO_at | 3E−32 | 84.4 | 50.2008 | Mm.71103 | 7E−41 | 87.08134 | 41.96787 |
| (SEQ ID NO: 1756) | | | | | | | |
| WAN013I3P_at | 1E−147 | 86.70213 | 99.29577 | #N/A | 1E−172 | 88.6121 | 98.94366 |
| (SEQ ID NO: 1653) | | | | | | | |
| WAN008DSX_at | 7E−51 | 94.07895 | 38.48101 | Mm.285993 | 6E−84 | 90.80882 | 68.86076 |
| (SEQ ID NO: 1757) | | | | | | | |
| WAN013HVK_at | 1E−164 | 88.38028 | 97.93103 | Mm.247837 | 0 | 94.3761 | 98.10345 |
| (SEQ ID NO: 1758) | | | | | | | |
| WAN008ECX_at | 9E−85 | 86.36364 | 65.0647 | Mm.30246 | 1E−155 | 94.85714 | 64.69501 |
| (SEQ ID NO: 1759) | | | | | | | |
| WAN008D27_at | 0 | 94.06308 | 99.26335 | Mm.298875 | 0 | 94.83395 | 99.81584 |
| (SEQ ID NO: 1760) | | | | | | | |
| WAN008DS9_at | 1E−113 | 89.01869 | 90.87049 | Mm.276826 | 1E−132 | 92.98246 | 84.71338 |
| (SEQ ID NO: 1613) | | | | | | | |
| AF022941_x_at | 9E−27 | 93.65079 | 69.61326 | Mm.17898 | 1E−52 | 96.26866 | 74.03315 |
| (SEQ ID NO: 1761) | | | | | | | |
| WAN008EEB_at | 2E−95 | 90.34483 | 55.98456 | Mm.276859 | 1E−128 | 94.61279 | 57.33591 |
| (SEQ ID NO: 1762) | | | | | | | |
| WAN0088J2_at | 1E−145 | 87.9017 | 98.8785 | Mm.218848 | 1E−156 | 88.18011 | 99.62617 |
| (SEQ ID NO: 1763) | | | | | | | |
| WAN0088PY_at | 0 | 0 | 0 | Mm.220038 | 0.0000002 | 92.85714 | 9.230769 |
| (SEQ ID NO: 1480) | | | | | | | |
| WAN013I1H_at | 1E−167 | 86.99473 | 99.64974 | Mm.261027 | 0 | 88.61646 | 100 |
| (SEQ ID NO: 1764) | | | | | | | |
| WAN008DVF_at | 1E−143 | 89.33333 | 100 | Mm.258140 | 0 | 95.11111 | 100 |
| (SEQ ID NO: 1765) | | | | | | | |
| WAN013I3F_at | 1E−111 | 84.33515 | 98.21109 | Mm.29553 | 0 | 90.87657 | 100 |
| (SEQ ID NO: 1718) | | | | | | | |
| WAN013HZ5_at | 0 | 93.29004 | 83.69565 | Mm.377134 | 0 | 96.31236 | 83.51449 |
| (SEQ ID NO: 1766) | | | | | | | |
| WAN008E8R_at | 1E−122 | 93.13725 | 71.16279 | Mm.27695 | 1E−140 | 95.46926 | 71.86047 |
| (SEQ ID NO: 1767) | | | | | | | |
| WAN013HZP_at | 1E−178 | 97.74648 | 72.44898 | Mm.185453 | 0 | 99.71831 | 72.44898 |
| (SEQ ID NO: 1644) | | | | | | | |
| WAN013IA4_at | 1E−174 | 92.89827 | 98.11676 | Mm.329353 | 0 | 95.2919 | 100 |
| (SEQ ID NO: 1768) | | | | | | | |
| WAN008E82_at | 8E−57 | 87.68657 | 64.57831 | Mm.31941 | 1E−162 | 93.9759 | 100 |
| (SEQ ID NO: 1769) | | | | | | | |
| D43757_at | 6E−15 | 85.04673 | 19.31408 | Mm.88793 | 3E−40 | 82.95455 | 47.65343 |
| (SEQ ID NO: 1770) | | | | | | | |
| WAN008E72_x_at | 6E−25 | 86.13861 | 100 | Mm.153226 | 9E−72 | 94.05941 | 100 |
| (SEQ ID NO: 1547) | | | | | | | |
| WAN008EXR_at | 9E−81 | 86.35015 | 100 | #N/A | 1E−103 | 89.22156 | 99.10979 |
| (SEQ ID NO: 1771) | | | | | | | |
| WAN008EQH_at | 5E−15 | 94.54545 | 12.22222 | Mm.10600 | 1E−57 | 90.26549 | 50.22222 |
| (SEQ ID NO: 1772) | | | | | | | |
| WAN008BR0_at | 0.000001 | 83.95062 | 15.0838 | Mm.230169 | 6E−26 | 88.80597 | 24.95345 |
| (SEQ ID NO: 1773) | | | | | | | |
| WAN008CFZ_at | 6E−18 | 90 | 14.76015 | Mm.358714 | 6E−29 | 91.17647 | 18.81919 |
| (SEQ ID NO: 1774) | | | | | | | |
| WAN013I1P_at | 0 | 97.22222 | 90.94737 | Mm.155896 | 0 | 96.52778 | 90.94737 |
| (SEQ ID NO: 1492) | | | | | | | |
| Y00365_at | 1E−104 | 93.97993 | 23.39593 | Mm.207047 | 1E−145 | 88.84058 | 53.99061 |
| (SEQ ID NO: 1674) | | | | | | | |
| WAN008EKL_at | 1E−120 | 89.60784 | 98.4556 | Mm.390461 | 0 | 91.68279 | 99.80695 |
| (SEQ ID NO: 1775) | | | | | | | |
| WAN013I8N_at | 0 | 90.28974 | 95.36968 | Mm.6065 | 0 | 93.18358 | 96.41524 |
| (SEQ ID NO: 1776) | | | | | | | |
| WAN0088O9_at | 1E−13 | 90.32258 | 16.48936 | Mm.263396 | 4E−55 | 90.49774 | 39.1844 |
| (SEQ ID NO: 1777) | | | | | | | |
| AF180918_at | 6E−21 | 88.57143 | 19.77401 | Mm.10281 | 5E−48 | 86.2069 | 49.15254 |
| (SEQ ID NO: 1778) | | | | | | | |
| WAN008E26_x_at | 7E−11 | 90.90909 | 57.89474 | #N/A | 6E−13 | 87.77778 | 78.94737 |
| (SEQ ID NO: 1779) | | | | | | | |
| WAN008BNG_at | 4E−90 | 93.77778 | 45.91837 | Mm.31247 | 1E−85 | 92.88889 | 45.91837 |
| (SEQ ID NO: 1780) | | | | | | | |
| WAN008EKF_at | 1E−151 | 89.65517 | 98.7234 | Mm.181009 | 0 | 94.20601 | 99.14894 |
| (SEQ ID NO: 1781) | | | | | | | |
| L18986_at | 4E−58 | 85.66176 | 20.76336 | Mm.16716 | 1E−157 | 86.94915 | 45.03817 |
| (SEQ ID NO: 1501) | | | | | | | |
| WAN008F1L_at | 1E−127 | 90.23355 | 84.86486 | Mm.2154 | 1E−131 | 88.44765 | 99.81982 |
| (SEQ ID NO: 1782) | | | | | | | |
| WAN008ESO_at | 0 | 92.12598 | 99.60784 | Mm.41288 | 0 | 94.88189 | 99.60784 |
| (SEQ ID NO: 1783) | | | | | | | |
| J00061_at | 3E−46 | 87.70053 | 66.31206 | Mm.192991 | 2E−64 | 91.89189 | 65.60284 |
| (SEQ ID NO: 1784) | | | | | | | |
| X79864_at | 4E−44 | 85.26786 | 38.75433 | Mm.133851 | 1E−107 | 85.79336 | 93.77163 |
| (SEQ ID NO: 1785) | | | | | | | |
| WAN008E43_at | 6E−86 | 87.12575 | 59.53654 | Mm.26614 | 1E−130 | 89.42308 | 74.1533 |
| (SEQ ID NO: 1786) | | | | | | | |
| WAN008DKS_at | 1E−116 | 92.16867 | 68.73706 | Mm.2720 | 0 | 93.39019 | 97.10145 |
| (SEQ ID NO: 1787) | | | | | | | |
| WAN008CQE_at | 5E−40 | 87.28324 | 33.7232 | Mm.1103 | 1E−128 | 87.47475 | 96.49123 |
| (SEQ ID NO: 1788) | | | | | | | |
| WAN008EE0_x_at | 0.00002 | 88.23529 | 13.31593 | Mm.290791 | 4E−26 | 84.47205 | 42.03655 |
| (SEQ ID NO: 1789) | | | | | | | |
| WAN013I17_at | 1E−101 | 83.47826 | 83.03249 | Mm.4691 | 9E−99 | 91.66667 | 45.48736 |
| (SEQ ID NO: 1790) | | | | | | | |
| WAN008BNY_at | 1E−129 | 92.30769 | 84.0796 | Mm.4467 | 1E−146 | 94.3787 | 84.0796 |
| (SEQ ID NO: 1791) | | | | | | | |
| WAN0088KK_x_at | 1E−30 | 95.58824 | 38.96848 | Mm.1025 | 4E−75 | 91.12903 | 71.06017 |
| (SEQ ID NO: 1792) | | | | | | | |
| WAN013I62_at | 1E−178 | 85.99222 | 56.64952 | Mm.34102 | 0 | 91.76788 | 54.44526 |
| (SEQ ID NO: 1732) | | | | | | | |
| WAN013I2X_at | 1E−129 | 88.28633 | 98.08511 | Mm.11815 | 0 | 93.76344 | 98.93617 |
| (SEQ ID NO: 1793) | | | | | | | |
| AB041733_at | 1E−39 | 92.56198 | 9.173616 | Mm.102205 | 4E−75 | 86.98413 | 23.88173 |
| (SEQ ID NO: 1794) | | | | | | | |
| WAN008DUC_at | 8E−86 | 94.63415 | 99.51456 | Mm.212411 | 4E−74 | 92.19512 | 99.51456 |
| (SEQ ID NO: 1795) | | | | | | | |
| AB004109_at | 0 | 91.24767 | 40.40632 | Mm.293591 | 0 | 89.98288 | 87.88563 |
| (SEQ ID NO: 1796) | | | | | | | |
| WAN0088ZP_at | 4E−10 | 91.52542 | 11.11111 | Mm.391419 | 8E−53 | 91.62562 | 38.22976 |
| (SEQ ID NO: 1482) | | | | | | | |
| WAN008E7A_at | 1E−164 | 91.43426 | 98.04688 | Mm.9052 | 1E−170 | 91.63347 | 98.04688 |
| (SEQ ID NO: 1797) | | | | | | | |
| WAN0088KG_at | 1E−115 | 87.5895 | 72.86957 | Mm.359633 | 1E−149 | 90.93079 | 72.86957 |
| (SEQ ID NO: 1539) | | | | | | | |
| WAN0088XS_at | 8E−13 | 85.04673 | 34.96732 | Mm.244236 | 7E−12 | 84.40367 | 35.62092 |
| (SEQ ID NO: 1798) | | | | | | | |
| WAN0088YU_at | 1E−107 | 94.02985 | 89.63211 | Mm.41998 | 1E−107 | 94.02985 | 89.63211 |
| (SEQ ID NO: 1799) | | | | | | | |
| WAN0088X9_at | 1E−108 | 89.17379 | 66.73004 | Mm.275864 | 1E−161 | 92.15686 | 87.26236 |
| (SEQ ID NO: 1553) | | | | | | | |
| WAN008CLK_at | 2E−55 | 88.47737 | 48.21429 | #N/A | 1E−161 | 92.07317 | 97.61905 |
| (SEQ ID NO: 1552) | | | | | | | |
| AB015640_at | 0 | 95 | 100 | Mm.148781 | 0 | 97.95455 | 100 |
| (SEQ ID NO: 1800) | | | | | | | |
| WAN013HVD_at | 0 | 95.8042 | 100 | Mm.757 | 0 | 96.32867 | 100 |
| (SEQ ID NO: 1801) | | | | | | | |
| WAN008DRK_at | 0.000005 | 86.66667 | 11.07011 | Mm.386835 | 6E−29 | 90.37037 | 24.90775 |
| (SEQ ID NO: 1802) | | | | | | | |
| WAN008DWV_x_at | 3E−59 | 96.83544 | 44.2577 | Mm.28474 | 1E−133 | 95.2381 | 100 |
| (SEQ ID NO: 1803) | | | | | | | |
| WAN013I1O_at | 1E−18 | 83.45324 | 27.8 | Mm.279485 | 1E−91 | 88.23529 | 61.2 |
| (SEQ ID NO: 1804) | | | | | | | |
| WAN008DC4_at | 4E−99 | 88.52941 | 68.41046 | Mm.289810 | 1E−154 | 90.58296 | 89.73843 |
| (SEQ ID NO: 1805) | | | | | | | |
| WAN013I36_f_at | 1E−14 | 89.41176 | 85.85859 | Mm.4071 | 3E−20 | 90.81633 | 98.9899 |
| (SEQ ID NO: 1806) | | | | | | | |
| WAN008CKA_at | 1E−112 | 87.2 | 100 | Mm.292775 | 1E−147 | 90 | 100 |
| (SEQ ID NO: 1807) | | | | | | | |
| WAN008EQG_at | 2E−57 | 87.26708 | 87.02703 | Mm.284686 | 1E−145 | 95.40541 | 100 |
| (SEQ ID NO: 1808) | | | | | | | |
| AF004831_at | 1E−18 | 88.88889 | 6.766917 | Mm.240336 | 5E−84 | 89.44099 | 24.21053 |
| (SEQ ID NO: 1536) | | | | | | | |
| WAN008EE3_at | 1E−116 | 90.80119 | 100 | Mm.28688 | 1E−136 | 93.17507 | 100 |
| (SEQ ID NO: 1809) | | | | | | | |
| WAN0088TG_at | 1E−58 | 89.0411 | 50.81206 | Mm.296976 | 1E−119 | 92.40122 | 76.33411 |
| (SEQ ID NO: 1540) | | | | | | | |
| S79122_x_at | 4E−47 | 98.44961 | 75.88235 | Mm.46401 | 2E−32 | 87.64706 | 100 |
| (SEQ ID NO: 1810) | | | | | | | |
| WAN008EFY_at | 1E−128 | 90.45093 | 71.94656 | Mm.272475 | 1E−136 | 91.44385 | 71.37405 |
| (SEQ ID NO: 1811) | | | | | | | |
| WAN008CSS_at | 0 | 90.3169 | 98.2699 | Mm.34562 | 0 | 94.80969 | 100 |
| (SEQ ID NO: 1812) | | | | | | | |
| AF039202_at | 0 | 88.80208 | 61.39089 | Mm.258633 | 0 | 93.61979 | 61.39089 |
| (SEQ ID NO: 1813) | | | | | | | |
| WAN013I25_at | 3E−81 | 86.88525 | 56.27306 | Mm.24867 | 1E−165 | 88.17006 | 99.8155 |
| (SEQ ID NO: 1814) | | | | | | | |
| WAN013HX6_at | 1E−111 | 86.72986 | 41.49459 | Mm.431979 | 1E−124 | 89.42065 | 39.03638 |
| (SEQ ID NO: 1815) | | | | | | | |
| WAN0088ST_at | 5E−18 | 84.31373 | 52.44216 | Mm.22252 | 3E−67 | 90.7563 | 61.18252 |
| (SEQ ID NO: 1816) | | | | | | | |
| WAN008D32_at | 4E−12 | 100 | 9.87013 | Mm.46701 | 1E−57 | 88.70968 | 64.41558 |
| (SEQ ID NO: 1817) | | | | | | | |
| WAN013I98_at | 0 | 84.09332 | 87.23404 | Mm.15312 | 0 | 90.04329 | 85.47641 |
| (SEQ ID NO: 1818) | | | | | | | |
| WAN013HUQ_x_at | 3E−48 | 90.50633 | 96.34146 | Mm.28969 | 7E−66 | 94.47853 | 99.39024 |
| (SEQ ID NO: 1819) | | | | | | | |
| L00365_at | 6E−24 | 90.32258 | 70.45455 | Mm.2661 | 4E−48 | 94.4 | 94.69697 |
| (SEQ ID NO: 1820) | | | | | | | |
| WAN008EKQ_at | 1E−127 | 92.2043 | 100 | Mm.242072 | 1E−164 | 95.16129 | 100 |
| (SEQ ID NO: 1821) | | | | | | | |
| WAN013I4X_at | 0 | 0 | 0 | Mm.206505 | 0 | 94.2623 | 100 |
| (SEQ ID NO: 1742) | | | | | | | |
| WAN013IA5_at | 0 | 94.43414 | 100 | Mm.130362 | 0 | 98.7013 | 100 |
| (SEQ ID NO: 1822) | | | | | | | |
| WAN0088TW_at | 1E−173 | 89.36567 | 98.52941 | Mm.27663 | 0 | 93.09701 | 98.52941 |
| (SEQ ID NO: 1745) | | | | | | | |
| WAN008DE8_at | 1E−106 | 89.75904 | 100 | Mm.303703 | 1E−127 | 92.66055 | 98.49398 |
| (SEQ ID NO: 1823) | | | | | | | |
| WAN008CSZ_at | 4E−22 | 86.41975 | 43.31551 | Mm.26017 | 1E−125 | 93.18182 | 62.7451 |
| (SEQ ID NO: 1824) | | | | | | | |
| WAN008EFO_at | 1E−153 | 90.94203 | 100 | Mm.275191 | 0 | 95.47101 | 100 |
| (SEQ ID NO: 1825) | | | | | | | |
| WAN008D2L_at | 2E−76 | 85.79882 | 80.09479 | Mm.88349 | 1E−63 | 86.92308 | 61.61137 |
| (SEQ ID NO: 1747) | | | | | | | |
| U29167_at | 0 | 92.83111 | 88.78101 | Mm.646 | 0 | 94.74313 | 90.29126 |
| (SEQ ID NO: 1672) | | | | | | | |
| WAN013IAB_x_at | 1E−150 | 82.44767 | 48.85917 | #N/A | 1E−133 | 81.32045 | 48.85917 |
| (SEQ ID NO: 1496) | | | | | | | |
| WAN008EUV_x_at | 7E−19 | 88.76404 | 36.17886 | Mm.297482 | 1E−65 | 88.21138 | 100 |
| (SEQ ID NO: 1826) | | | | | | | |
| WAN008E9O_at | 1E−49 | 86.76414 | 43.074 | Mm.241334 | 1E−97 | 95.55556 | 42.6945 |
| (SEQ ID NO: 1827) | | | | | | | |
| WAN008DK3_at | 1E−98 | 89.41799 | 100 | Mm.289630 | 1E−151 | 94.17989 | 100 |
| (SEQ ID NO: 1828) | | | | | | | |
| WAN008DK1_at | 3E−69 | 85.66879 | 64.87603 | Mm.335460 | 1E−110 | 91.0828 | 64.87603 |
| (SEQ ID NO: 1829) | | | | | | | |
| AF004368_at | 1E−116 | 91.77215 | 53.92491 | Mm.28877 | 1E−147 | 90.86538 | 70.98976 |
| (SEQ ID NO: 1749) | | | | | | | |
| WAN008D7G_at | 0.0000004 | 97.56098 | 7.400722 | Mm.273930 | 9E−19 | 91.86047 | 15.52347 |
| (SEQ ID NO: 1750) | | | | | | | |
| WAN013I7T_at | 2E−36 | 89.92806 | 24.5583 | #N/A | 1E−171 | 92.13251 | 85.33569 |
| (SEQ ID NO: 1830) | | | | | | | |
| X63416_at | 4E−28 | 86.2069 | 27.30697 | Mm.317339 | 1E−157 | 100 | 52.91902 |
| (SEQ ID NO: 1831) | | | | | | | |
| S74024_at | 4E−54 | 87.73585 | 96.36364 | Mm.247036 | 6E−64 | 89.09091 | 100 |
| (SEQ ID NO: 1832) | | | | | | | |
| WAN008906_at | 1E−162 | 90.1354 | 94.86239 | Mm.17519 | 0 | 92.84404 | 100 |
| (SEQ ID NO: 1833) | | | | | | | |
| WAN008CO7_at | 1E−166 | 89.8 | 88.33922 | Mm.29145 | 0 | 91.56194 | 98.40989 |
| (SEQ ID NO: 1834) | | | | | | | |
| UP (Originally 78) | | | | | | | |
| L00178_at | 90.0621118 | 42.81915 | Mm.316652 | 1E−57 | 93.037975 | 42.02128 | |
| (SEQ ID NO: 1507) | | | | | | | |
| L00327_x_at | 95.23809524 | 97.67442 | Mm.61526 | 2E−41 | 93.220339 | 91.47287 | |
| (SEQ ID NO: 1835) | | | | | | | |
| WAN013HXI_at | 83.06010929 | 98.74101 | Mm.229342 | 0 | 88.321168 | 98.56115 | |
| (SEQ ID NO: 1836) | | | | | | | |
| AF022944_at | 93.2038835 | 59.53757 | #N/A | 2E−44 | 97.087379 | 59.53757 | |
| (SEQ ID NO: 1837) | | | | | | | |
| WAN013HTZ_at | 93.20754717 | 99.43715 | Mm.238213 | 0 | 93.962264 | 99.43715 | |
| (SEQ ID NO: 1838) | | | | | | | |
| WAN008CI5_at | 89.21282799 | 68.6 | Mm.289747 | 1E−142 | 93.586006 | 68.6 | |
| (SEQ ID NO: 1839) | | | | | | | |
| M29895_at | 86.82170543 | 54.66102 | Mm.38274 | 9E−17 | 93.442623 | 25.84746 | |
| (SEQ ID NO: 1840) | | | | | | | |
| X81405_at | 92.59259259 | 81.11588 | Mm.4298 | 7E−30 | 92.631579 | 40.77253 | |
| (SEQ ID NO: 1682) | | | | | | | |
| D11452_at | 94.84536082 | 17.41472 | Mm.248452 | 4E−95 | 87.257618 | 64.81149 | |
| (SEQ ID NO: 1841) | | | | | | | |
| WAN013I0X_at | 90.78498294 | 56.13027 | Mm.252316 | 1E−129 | 95.189003 | 55.74713 | |
| (SEQ ID NO: 1581) | | | | | | | |
| WAN008F1C_x_at | 81.92090395 | 58.22368 | Mm.294664 | 6E−34 | 84.11215 | 70.39474 | |
| (SEQ ID NO: 1842) | | | | | | | |
| WAN0088K7_x_at | 0 | 0 | Mm.330160 | 0.000008 | 100 | 6.923077 | |
| (SEQ ID NO: 1506) | | | | | | | |
| WAN013HWO_x_at | 84.68085106 | 94 | Mm.87773 | 2E−66 | 87.804878 | 98.4 | |
| (SEQ ID NO: 1529) | | | | | | | |
| L38710_x_at | 80.44554455 | 29.51059 | Mm.140811 | IE−134 | 90.024331 | 30.02191 | |
| (SEQ ID NO: 1843) | | | | | | | |
| WAN013I9D_at | 85.49848943 | 26.4166 | Mm.116721 | 1E−122 | 92.236025 | 25.69832 | |
| (SEQ ID NO: 1525) | | | | | | | |
| D89285_at | 82.95218295 | 80.97643 | Mm.3227 | 1E−127 | 87.366167 | 78.61953 | |
| (SEQ ID NO: 1844) | | | | | | | |
| WAN0088SX_x_at | 84.93150685 | 67.59259 | Mm.122725 | 9E−15 | 90.410959 | 67.59259 | |
| (SEQ ID NO: 1845) | | | | | | | |
| AB028638_at | 83.68421053 | 84.63252 | Mm.144089 | 1E−169 | 91.759465 | 100 | |
| (SEQ ID NO: 1846) | | | | | | | |
| WAN008CWW_at | 86.20689655 | 21.75 | Mm.86410 | 1E−17 | 86.868687 | 24.75 | |
| (SEQ ID NO: 1690) | | | | | | | |
| WAN008EIS_at | 92.87054409 | 98.15838 | Mm.234641 | 0 | 94.814815 | 99.44751 | |
| (SEQ ID NO: 1847) | | | | | | | |
| WAN008DXF_x_at | 97.5308642 | 96.42857 | Mm.152890 | 9E−36 | 97.619048 | 100 | |
| (SEQ ID NO: 1848) | | | | | | | |
| WAN008D13_at | 88.74598071 | 64.2562 | Mm.210155 | 1E−118 | 90.168539 | 73.55372 | |
| (SEQ ID NO: 1849) | | | | | | | |
| AF022945-rc_f_at | 0 | 0 | Mm.24096 | 1E−13 | 89.552239 | 65.04854 | |
| (SEQ ID NO: 1666) | | | | | | | |
| L22614_at | 88.80407125 | 29.26284 | Mm.4159 | 1E−129 | 91.759465 | 33.43261 | |
| (SEQ ID NO: 1850) | | | | | | | |
| L19142_f_at | 87.12871287 | 70.26087 | Mm.28683 | 0 | 91.474245 | 97.91304 | |
| (SEQ ID NO: 1851) | | | | | | | |
| AY012002_at | 85.34031414 | 92.27053 | Mm.238127 | 1E−153 | 91.545894 | 100 | |
| (SEQ ID NO: 1852) | | | | | | | |
| WAN0088P2_at | 86.73267327 | 91.98543 | Mm.27969 | 1E−177 | 90.018832 | 96.72131 | |
| (SEQ ID NO: 1853) | | | | | | | |
| AF271265_at | 87.22627737 | 47.32297 | Mm.6254 | 1E−11B | 95.131086 | 46.11399 | |
| (SEQ ID NO: 1854) | | | | | | | |
| WAN008ERE_x_at | 86.12716763 | 98.29545 | Mm.390835 | 2E−57 | 91.32948 | 98.29545 | |
| (SEQ ID NO: 1855) | | | | | | | |

[0147] TABLE 19
late comparison

| Qualifier List | Fold | | | Human | | | | | | | |
|---|---|---|---|---|---|---|---|---|---|---|---|
| (SEQ ID NO:) | Change | Symbol | Title | Unigene ID | eValue | % ID | % QC | Mouse Unigene ID | eValue | % ID | % QC |
| Down (Originally 26) | | | | | | | | | | | |
| WAN008EB0_at | 1.656 | ACOT7 | Acyl-CoA thioesterase 7 | Hs.126137 | 1E−49 | 88.64865 | 50.40872 | Mm.296191 | 3E−70 | 93.04813 | 50.95368 |
| (SEQ ID NO: 1699) | | | | | | | | | | | |
| BI431005_x_at | 1.513 | CCDC67 | Coiled-coil domain containing 67 | Hs.436625 | 2E−22 | 82.51366 | 89.26829 | Mm.32237 | 2E−60 | 90.20619 | 94.63415 |
| (SEQ ID NO: 1856) | | | | | | | | | | | |
| WAN0088O9_at | 1.661 | Itgb1 | Integrin beta 1 (fibronectin | Hs.295626 | 1E−13 | 90.32258 | 16.48936 | Mm.263396 | 4E−55 | 90.49774 | 39.1844 |
| (SEQ ID NO: 1777) | | | receptor beta) | | | | | | | | |
| M99691_at | 1.713 | NA | M99691 Hamster retroviral | #N/A | 0 | 0 | 0 | #N/A | 0 | 0 | 0 |
| (SEQ ID NO: 1857) | | | sequence mRNA. | | | | | | | | |
| J00061_at | 1.682 | MT1 | metallothionein I | #N/A | 3E−46 | 87.70053 | 66.31206 | Mm.192991 | 2E−64 | 91.89189 | 65.60284 |
| (SEQ ID NO: 1784) | | | | | | | | | | | |
| AY029611_f_at | 1.569 | OPN1SW | Opsin 1 (cone pigments), short- | Hs.592258 | 0.00000005 | 83.72093 | 91.48936 | Mm.56987 | 5E−25 | 90.42553 | 100 |
| (SEQ ID NO: 1858) | | | wave-sensitive (color blindness, | | | | | | | | |
| | | | tritan) | | | | | | | | |
| U21937_at | 1.723 | Kcnj6 | Potassium inwardly-rectifying | Hs.50927 | 0.000001 | 84.93151 | 13.27273 | Mm.328720 | 2E−19 | 86.36364 | 20 |
| (SEQ ID NO: 1859) | | | channel, subfamily J, member 6 | | | | | | | | |
| WAN0088KG_at | 2.203 | PPGB | Protective protein for beta- | Hs.517076 | 1E−115 | 87.5895 | 72.86957 | Mm.359633 | 1E−149 | 90.93079 | 72.86957 |
| (SEQ ID NO: 1539) | | | galactosidase (galactosialidosis) | | | | | | | | |
| WAN008DC4_at | 2.003 | Rpl14 | Ribosomal protein L14 | Hs.446522 | 4E−99 | 88.52941 | 68.41046 | Mm.289810 | 1E−154 | 90.58296 | 89.73843 |
| (SEQ ID NO: 1805) | | | | | | | | | | | |
| WAN013I36_f_at | 1.619 | RPSA | Ribosomal protein SA | Hs.449909 | 1E−14 | 89.41176 | 85.85859 | Mm.4071 | 3E−20 | 90.81633 | 98.9899 |
| (SEQ ID NO: 1806) | | | | | | | | | | | |
| M87540_at | 1.589 | Scn1a | Sodium channel, voltage-gated, | Hs.22654 | 0 | 94.89051 | 100 | Mm.365737 | 2E−86 | 85.67708 | 93.43066 |
| (SEQ ID ND: 1860) | | | type I, alpha | | | | | | | | |
| U66490_at | 1.574 | STAR | Steroidogenic acute regulator | Hs.521535 | 6E−88 | 87.27811 | 26.02002 | Mm.293314 | 1E−120 | 90.9621 | 26.40493 |
| (SEQ ID NO: 1861) | | | | | | | | | | | |
| WAN013I4X_at | 1.55 | Timp2 | Tissue inhibitor of | Hs.633514 | 0 | 0 | 0 | Mm.206505 | 0 | 94.2623 | 100 |
| (SEQ ID NO: 1742) | | | metalloproteinase 2 | | | | | | | | |
| WAN008DE8_at | 1.552 | TIMM23 | Translocase of inner | Hs.524308 | 1E−106 | 89.75904 | 100 | Mm.303703 | 1E−127 | 92.66055 | 98.49398 |
| (SEQ ID NO: 1823) | | | mitochondrial membrane 23 | | | | | | | | |
| | | | homolog (yeast) | | | | | | | | |
| WAN013I7T_at | 1.524 | HRAS | V-Ha-ras Harvey rat sarcoma | Hs.37003 | 2E−36 | 89.92806 | 24.5583 | #N/A | 1E−171 | 92.13251 | 85.33569 |
| (SEQ ID NO: 1830) | | | viral oncogene homolog | | | | | | | | |
| UP (Originally 170) | | | | | | | | | | | |
| (SEQ ID NO:) | | | | | | | | | | | |
| L00169_at | 2.832861 | Hmgcr | 3-hydroxy-3-methylglutaryl- | Hs.643495 | 2E−19 | 89.53488 | 33.99209 | Mm.316652 | 7E−27 | 94.87179 | 30.83004 |
| (SEQ ID NO: 1508) | | | Coenzyme A reductase | | | | | | | | |
| L00332_at | 2.849003 | HMGCS1 | 3-hydroxy-3-methylglutaryl- | Hs.397729 | 3E−41 | 90.57971 | 95.83333 | Mm.61526 | 1E−42 | 92.1875 | 88.88889 |
| (SEQ ID NO: 1862) | | | Coenzyme A synthase 1 | | | | | | | | |
| | | | (soluble) | | | | | | | | |
| WAN008BQY_at | 1.960784 | PFKFB4 | 6-phosphofructo-2- | Hs.476217 | 8E−87 | 89.32384 | 98.59649 | Mm.132391 | 1E−113 | 92.98246 | 100 |
| (SEQ ID NO: 1863) | | | kinase/fructose-2,6- | | | | | | | | |
| | | | biphosphatase 4 | | | | | | | | |
| WAN013HXI_at | 1.724138 | ACAT2 | Acetyl-Coenzyme A | Hs.571037 | 1E−122 | 83.06011 | 98.74101 | Mm.229342 | 0 | 88.32117 | 98.56115 |
| (SEQ ID NO: 1836) | | | acetyltransferase 2 (acetoacetyl | | | | | | | | |
| | | | Coenzyme A thiolase) | | | | | | | | |
| AF022944_at | 1.642036 | NA | AF022944 Cricetulus griseus | #N/A | 1E−34 | 93.20388 | 59.53757 | #N/A | 2E−44 | 97.08738 | 59.53757 |
| (SEQ ID NO: 1837) | | | DNA damage inducible clone | | | | | | | | |
| | | | similar to eukaryotic initiation | | | | | | | | |
| | | | factor 5 (elF-5) cDNA, partial | | | | | | | | |
| | | | sequence. | | | | | | | | |
| WAN008DJ2_at | 2.061856 | Anapc1 | Anaphase promoting complex | Hs.436527 | 1E−152 | 89.30818 | 96.95122 | Mm.277408 | 0 | 94.96855 | 96.95122 |
| (SEQ ID NO: 1864) | | | subunit 1 | | | | | | | | |
| WAN008DNR_at | 1.694915 | ANKRD32 | Ankyrin repeat domain 32 | Hs.556673 | 1E−67 | 87.64479 | 64.75 | Mm.209730 | 1E−117 | 89.43089 | 92.25 |
| (SEQ ID NO: 1865) | | | | | | | | | | | |
| WAN008EKW_at | 1.776199 | RERE | Arginine-glutamic acid dipeptide | Hs.463041 | 1E−147 | 90.25845 | 97.85992 | Mm.291274 | 0 | 93.77432 | 100 |
| (SEQ ID NO: 1866) | | | (RE) repeats | | | | | | | | |
| WAN008BSS_at | 1.636661 | ATAD2 | ATPase family, AAA domain | Hs.370834 | 7E−51 | 86.74699 | 61.63366 | Mm.221758 | 8E−71 | 91.34615 | 51.48515 |
| (SEQ ID NO: 1867) | | | containing 2 | | | | | | | | |
| WAN013I05_at | 1.577287 | ABCB6 | ATP-binding cassette, sub-family | Hs.107911 | 1E−154 | 87.15084 | 100 | Mm.28663 | 0 | 91.80633 | 100 |
| (SEQ ID NO: 1646) | | | B (MDR/TAP), member 6 | | | | | | | | |
| WAN008DGC_at | 1.623377 | BAIAP2L1 | BAI1-associated protein 2-like 1 | Hs.584939 | 2E−34 | 83.69099 | 100 | Mm.18814 | 3E−75 | 90.98712 | 100 |
| (SEQ ID NO: 1868) | | | | | | | | | | | |
| WAN013HTZ_at | 6.17284 | BCL2L1 | BCL2-like 1 | Hs.516966 | 0 | 93.20755 | 99.43715 | Mm.238213 | 0 | 93.96226 | 99.43715 |
| (SEQ ID NO: 1838) | | | | | | | | | | | |
| WAN008CYH-at | 1.639344 | CALD1 | Caldesmon 1 | Hs.490203 | 1E−152 | 89.07216 | 85.53792 | Mm.308134 | 0 | 92.76896 | 100 |
| (SEQ ID NO: 1869) | | | | | | | | | | | |
| WAN008BSH_at | 1.529052 | CAT | Catalase | Hs.502302 | 6E−16 | 89.28571 | 38.70968 | Mm.4215 | 3E−41 | 89.24731 | 85.71429 |
| (SEQ ID NO: 1558) | | | | | | | | | | | |
| WAN008CI5_at | 1.858736 | CDC20 | CDC20 cell division cycle 20 | Hs.524947 | 1E−105 | 89.21283 | 68.6 | Mm.289747 | 1E−142 | 93.58601 | 68.6 |
| (SEQ ID NO: 1839) | | | homolog (S. cerevisiae) | | | | | | | | |
| WAN013I2T_at | 1.531394 | CBX5 | Chromobox homolog 5 (HP1 | Hs.632724 | 1E−142 | 91.86352 | 72.02268 | Mm.262059 | 1E−168 | 94.75066 | 72.02268 |
| (SEQ ID NO: 1652) | | | alpha homolog, Drosophila) | | | | | | | | |
| WAN008D17_at | 1.531394 | COPA | Coatomer protein complex, | Hs.162121 | 0 | 92.98597 | 96.14644 | Mm.30041 | 0 | 94.32485 | 98.45857 |
| (SEQ ID NO: 1870) | | | subunit alpha | | | | | | | | |
| WAN013HWY_at | 3.968254 | CCDC80 | Coiled-coil domain containing 80 | Hs.477128 | 6E−92 | 86.55914 | 76.07362 | Mm.181074 | 1E−171 | 90.57377 | 99.7955 |
| (SEQ ID NO: 1710) | | | | | | | | | | | |
| WAN008CI3_at | 1.55521 | CCNJ | Cyclin J | Hs.596479 | 1E−145 | 93.71429 | 77.60532 | Mm.309 | 1E−105 | 88.85714 | 77.60532 |
| (SEQ ID NO: 1680) | | | | | | | | | | | |
| U66494_at | 1.552795 | CYP17A1 | Cytochrome P450, family 17, | Hs.438016 | 4E−47 | 81.94842 | 62.21034 | Mm.1262 | 1E−70 | 82.58929 | 79.8574 |
| (SEQ ID NO: 1871) | | | subfamily A, polypeptide 1 | | | | | | | | |
| WAN00893H_at | 1.594896 | DDX23 | DEAD (Asp-Glu-Ala-Asp) box | Hs.130098 | 1E−163 | 90.41667 | 97.36308 | Mm.45725 | 1E−173 | 91.09731 | 97.9716 |
| (SEQ ID NO: 1872) | | | polypeptide 23 | | | | | | | | |
| WAN013HUL_at | 1.605136 | DDX3X | DEAD (Asp-Glu-Ala-Asp) box | Hs.380774 | 1E−78 | 93.75 | 42.27642 | Mm.289662 | 2E−88 | 91.76955 | 49.39024 |
| (SEQ ID NO: 1873) | | | polypeptide 3, X-linked | | | | | | | | |
| WAN0088WF_at | 1.814882 | DHX36 | DEAH (Asp-Glu-Ala-His) box | Hs.446270 | 2E−97 | 92.07547 | 55.67227 | Mm.224233 | 1E−113 | 94.40299 | 56.30252 |
| (SEQ ID NO: 1874) | | | polypeptide 36 | | | | | | | | |
| WAN0088OR_at | 1.74216 | EIF5B | Eukaryotic translation initiation | Hs.158688 | 2E−61 | 91.17647 | 41.04628 | Mm.260943 | 2E−71 | 89.30041 | 48.89336 |
| (SEQ ID NO: 1875) | | | factor 5B | | | | | | | | |
| WAN008DNP_at | 1.776199 | XPO1 | Exportin 1 (CRM1 homolog, | Hs.370770 | 0 | 91.08527 | 98.47328 | Mm.217547 | 0 | 94.84733 | 100 |
| (SEQ ID NO: 1876) | | | yeast) | | | | | | | | |
| WAN008D0K_at | 1.538462 | AA408296 | Expressed sequence AA408296 | #N/A | 1E−110 | 86.77494 | 96.85393 | Mm.173758 | 1E−143 | 89.86486 | 99.77528 |
| (SEQ ID NO: 1877) | | | | | | | | | | | |
| WAN008CPJ_at | 1.538462 | Fdft1 | Farnesyl diphosphate farnesyl | Hs.593928 | 1E−123 | 85.09874 | 99.64222 | Mm.425927 | 0 | 0 | 0 |
| (SEQ ID NO: 1878) | | | transferase 1 | | | | | | | | |
| WAN013I1W_at | 1.52207 | FDPS | Farnesyl diphosphate synthase | Hs.335918 | 1E−146 | 86.11632 | 100 | Mm.39472 | 0 | 90.78947 | 99.81238 |
| (SEQ ID NO: 1879) | | | (farnesyl pyrophosphate | | | | | | | | |
| | | | synthetase, | | | | | | | | |
| | | | dimethylallyltranstransferase, | | | | | | | | |
| | | | geranyltranstransferase) | | | | | | | | |
| WAN008CQY_at | 1.589825 | FBXL11 | F-box and leucine-rich repeat | Hs.124147 | 0 | 93.30544 | 88.3549 | Mm.31941 | 0 | 97.57914 | 99.26063 |
| (SEQ ID NO: 1880) | | | protein 11 | | | | | | | | |
| WAN008CQH_at | 1.923077 | FTSJ3 | FtsJ homolog 3 (E. coli) | Hs.463785 | 1E−82 | 88.44884 | 84.63687 | Mm.29795 | 1E−110 | 91.69329 | 87.43017 |
| (SEQ ID NO: 1881) | | | | | | | | | | | |
| WAN0088Y2_at | 1.529052 | Ggnbp2 | Gametogenetin binding protein 2 | #N/A | 0 | 90.99265 | 100 | Mm.356653 | 0 | 93.56618 | 100 |
| (SEQ ID NO: 1882) | | | | | | | | | | | |
| WAN01310X_at | 1.831502 | GSS | Glutathione synthetase | Hs.82327 | 1E−98 | 90.78498 | 56.13027 | Mm.252316 | 1E−129 | 95.189 | 55.74713 |
| (SEQ ID NO: 1581) | | | | | | | | | | | |
| WAN008DXA_at | 1.669449 | GPD2 | Glycerol-3-phosphate | Hs.512382 | 1E−111 | 86.72769 | 98.6456 | Mm.3711 | 1E−159 | 91.15646 | 99.54853 |
| (SEQ ID NO: 1883) | | | dehydrogenase 2 (mitochondrial) | | | | | | | | |
| AF307847_at | 1.776199 | GAB1 | GRB2-associated binding | Hs.80720 | 7E−98 | 85.99034 | 76.52495 | Mm.277409 | 1E−136 | 89.57346 | 78.0037 |
| (SEQ ID NO: 1884) | | | protein 1 | | | | | | | | |
| WAN008EAH_at | 1.508296 | GTPBP4 | GTP binding protein 4 | Hs.215766 | 1E−126 | 88.42795 | 88.07692 | Mm.41800 | 0 | 95.41485 | 88.07692 |
| (SEQ ID NO: 1885) | | | | | | | | | | | |
| WAN0088K7_x_at | 2.463054 | Hspa5 | Heat shock 70 kD protein 5 | Hs.605502 | 0 | 0 | 0 | Mm.330160 | 0.000008 | 100 | 6.923077 |
| (SEQ ID NO: 1506) | | | (glucose-regulated protein) | | | | | | | | |
| WAN013HWO_x_at | 2.10084 | HSP90B1 | Heat shock protein 90 kDa beta | Hs.192374 | 2E−48 | 84.68085 | 94 | Mm.87773 | 2E−66 | 87.80488 | 98.4 |
| (SEQ ID NO: 1529) | | | (Grp94), member 1 | | | | | | | | |
| WAN008DQ1_at | 1.6 | Herpud2 | HERPUD family member 2 | Hs.599851 | 3E−31 | 95.34884 | 26.95925 | Mm.142843 | 1E−106 | 90.28213 | 100 |
| (SEQ ID NO: 1886) | | | | | | | | | | | |
| WAN008EVU_x_at | 1.610306 | HNRPK | Heterogeneous nuclear | Hs.522257 | 1E−129 | 92.9878 | 59.63636 | Mm.142872 | 1E−170 | 90.5838 | 96.54545 |
| (SEQ ID NO: 1887) | | | ribonucleoprotein K | | | | | | | | |
| L38709_at | 1.706485 | HSD3B | Hydroxy-delta-5-steroid | #N/A | 2E−41 | 82.53425 | 29.46519 | #N/A | 1E−151 | 85.82803 | 63.37033 |
| (SEQ ID NO: 1888) | | | dehydrogenase, 3 beta- and | | | | | | | | |
| | | | steroid delta-isomerase | | | | | | | | |
| WAN013I9D_at | 1.712329 | HYOU1 | Hypoxia up-regulated 1 | Hs.277704 | 4E−72 | 85.49849 | 26.4166 | Mm.116721 | 1E−122 | 92.23602 | 25.69832 |
| (SEQ ID NO: 1525) | | | | | | | | | | | |
| WAN008CF7_at | 1.760563 | IVNS1ABP | Influenza virus NS1A binding | Hs.497183 | 0 | 93.27434 | 100 | Mm.33764 | 0 | 97.34513 | 100 |
| (SEQ ID NO: 1889) | | | protein | | | | | | | | |
| D89285_at | 1.712329 | ITIH1 | Inter-alpha (globulin) inhibitor H1 | Hs.420257 | 2E−80 | 82.95218 | 80.97643 | Mm.3227 | 1E−127 | 87.36617 | 78.61953 |
| (SEQ ID NO: 1844) | | | | | | | | | | | |
| WAN008EX2_x_at | 1.650165 | Ifrd1 | Interferon-related developmental | Hs.7879 | 7E−39 | 90.29851 | 100 | Mm.168 | 5E−63 | 97.76119 | 100 |
| (SEQ ID NO: 1575) | | | regulator 1 | | | | | | | | |
| AF046210_at | 1.706485 | IL10 | Interleukin 10 | Hs.193717 | 3E−65 | 84.14986 | 92.53333 | Mm.874 | 1E−134 | 91.37466 | 98.93333 |
| (SEQ ID NO: 1890) | | | | | | | | | | | |
| X56067_at | 1.724138 | IAPP | Islet amyloid polypeptide | Hs.46835 | 3E−17 | 83.45324 | 20.65379 | Mm.415 | 7E−91 | 88.03681 | 48.43982 |
| (SEQ ID NO: 1891) | | | | | | | | | | | |
| WAN008D55-rc_at | 1.77305 | Lamb1_predicted | Laminin, beta 1 (predicted) | #N/A | 1E−155 | 87.82288 | 97.48201 | #N/A | 1E−161 | 91.66667 | 77.69784 |
| (SEQ ID NO: 1603) | | | | | | | | | | | |
| WAN00895S_at | 1.52439 | LRRC59 | Leucine rich repeat containing | Hs.370927 | 0 | 89.7482 | 100 | Mm.172720 | 0 | 92.6259 | 100 |
| (SEQ ID NO: 1892) | | | 59 | | | | | | | | |
| AF306662_at | 2.008032 | MMP14 | Matrix metallopeptidase 14 | Hs.2399 | 0 | 89.72603 | 99.82906 | Mm.280175 | 0 | 90.08547 | 100 |
| (SEQ ID NO: 1729) | | | (membrane-inserted) | | | | | | | | |
| WAN013I96_at | 1.533742 | MDM2 | Mdm2, transformed 3T3 cell | Hs.567303 | 5E−83 | 86.03896 | 51.41903 | Mm.22670 | 2E−89 | 87.10692 | 53.08848 |
| (SEQ ID NO: 1893) | | | double minute 2, p53 binding | | | | | | | | |
| | | | protein (mouse) | | | | | | | | |
| WAN008EQD_at | 1.718213 | Mx2 | Myxovirus (influenza virus) | Hs.926 | 2E−29 | 80.31746 | 75 | Mm.14157 | 2E−99 | 85.95238 | 100 |
| (SEQ ID NO: 1894) | | | resistance 2 | | | | | | | | |
| WAN0088IR_at | 1.615509 | NQO1 | NAD(P)H dehydrogenase, | Hs.406515 | 1E−42 | 87.57062 | 62.76596 | Mm.252 | 4E−87 | 90.73359 | 91.84397 |
| (SEQ ID NO: 1895) | | | quinone 1 | | | | | | | | |
| WAN008DWL_at | 1.5625 | NEK2 | NIMA (never in mitosis gene a)- | Hs.153704 | 1E−71 | 87.38739 | 58.42105 | Mm.33773 | 1E−152 | 89.13934 | 85.61404 |
| (SEQ ID NO: 1896) | | | related kinase 2 | | | | | | | | |
| WAN013I9Q_f_at | 1.66113 | NKX6-1 | NK6 transcription factor related, | Hs.546270 | 0.00002 | 89.3617 | 10 | Mm.193072 | 5E−26 | 95.89041 | 15.53191 |
| (SEQ ID NO: 1897) | | | locus 1 (Drosophila) | | | | | | | | |
| WAN008ECD_at | 1.697793 | NARG1 | NMDA receptor regulated 1 | Hs.555985 | 0 | 94.43299 | 99.58932 | Mm.275281 | 0 | 96.70103 | 99.58932 |
| (SEQ ID NO: 1898) | | | | | | | | | | | |
| WAN008BT6_at | 1.54321 | NVL | Nuclear VCP-like | Hs.497867 | 1E−86 | 86.31285 | 70.47244 | Mm.263464 | 1E−156 | 91.42212 | 87.20472 |
| (SEQ ID NO: 1899) | | | | | | | | | | | |
| WAN008E89_at | 1.612903 | Nup160 | Nucleoporin 160 | Hs.645358 | 0 | 92.35182 | 98.12383 | Mm.24532 | 0 | 94.3609 | 99.81238 |
| (SEQ ID NO: 1900) | | | | | | | | | | | |
| WAN008EXG_at | 1.547988 | NUP98 | Nucleoporin 98 kDa | Hs.524750 | 1E−108 | 88.66499 | 95.43269 | Mm.215288 | 1E−145 | 91.10577 | 100 |
| (SEQ ID NO: 1901) | | | | | | | | | | | |
| WAN008EVI-rc_at | 2.325581 | Pparbp | Peroxisome proliferator activated | Hs.643754 | 5E−35 | 90.83333 | 51.06383 | Mm.12926 | 2E−76 | 90.6383 | 100 |
| (SEQ ID NO: 1902) | | | receptor binding protein | | | | | | | | |
| WAN008DHY_at | 1.515152 | PIK4CA | Phosphatidylinositol 4-kinase, | Hs.529438 | 1E−172 | 88.44133 | 99.82517 | Mm.5718 | 0 | 92.43243 | 97.02797 |
| (SEQ ID NO: 1903) | | | catalytic, alpha polypeptide | | | | | | | | |
| WAN008CYA_at | 1.577287 | PIR | Pirin (iron-binding nuclear | Hs.495728 | 1E−111 | 86.87783 | 76.60312 | Mm.293463 | 1E−110 | 89.9705 | 58.75217 |
| (SEQ ID NO: 1904) | | | protein) | | | | | | | | |
| WAN013I81_at | 1.644737 | POLD1 | Polymerase (DNA directed), | Hs.279413 | 0 | 86.30952 | 98.31748 | Mm.16549 | 0 | 91.73372 | 100 |
| (SEQ ID NO: 1905) | | | delta 1, catalytic subunit 125 kDa | | | | | | | | |
| WAN008BQZ_at | 1.757469 | KCTD7 | Potassium channel | Hs.546627 | 2E−58 | 91.01124 | 36.47541 | Mm.55812 | 1E−116 | 97.05882 | 48.77049 |
| (SEQ ID NO: 1906) | | | tetramerisation domain | | | | | | | | |
| | | | containing 7 | | | | | | | | |
| WAN008CQA_at | 1.642036 | PKN2 | Protein kinase N2 | Hs.440833 | 0 | 91.79389 | 100 | Mm.244236 | 0 | 93.70229 | 100 |
| (SEQ ID NO: 1907) | | | | | | | | | | | |
| WAN013HXP_at | 1.515152 | PPP1R12A | Protein phosphatase 1, | Hs.49582 | 0 | 93.40463 | 100 | Mm.207499 | 3E−18 | 89.61039 | 13.72549 |
| (SEQ ID NO: 1908) | | | regulatory (inhibitor) subunit 12A | | | | | | | | |
| WAN008E7E_at | 2.03666 | PTAR1 | Protein prenyltransferase alpha | Hs.494100 | 1E−125 | 87.72321 | 92.37113 | Mm.32215 | 1E−169 | 91.32321 | 95.05155 |
| (SEQ ID NO: 1909) | | | subunit repeat containing 1 | | | | | | | | |
| WAN008EXW_at | 1.550388 | PPFIA1 | Protein tyrosine phosphatase, | Hs.530749 | 4E−61 | 85.56338 | 89.87342 | Mm.272809 | 1E−133 | 93.98734 | 100 |
| (SEQ ID NO: 1910) | | | receptor type, f polypeptide | | | | | | | | |
| | | | (PTPRF), interacting protein | | | | | | | | |
| | | | (liprin), alpha 1 | | | | | | | | |
| WAN013I0K_at | 1.610306 | PRPF8 | PRP8 pre-mRNA processing | Hs.181368 | 0 | 88.03419 | 98.81757 | Mm.3757 | 0 | 91.83673 | 99.32432 |
| (SEQ ID NO: 1911) | | | factor 8 homolog (S. cerevisiae) | | | | | | | | |
| WAN008E6L_at | 1.533742 | NA | RC WAN008E6L 11230B-F04 | #N/A | 0 | 0 | 0 | #N/A | 2E−13 | 88.15789 | 17.92453 |
| (SEQ ID NO: 1912) | | | | | | | | | | | |
| WAN008BR5_at | 1.851652 | RCBTB2 | Regulator of chromosome | Hs.25447 | 1E−68 | 89.42731 | 43.90716 | Mm.280068 | 1E−166 | 90.17682 | 98.45261 |
| (SEQ ID NO: 1913) | | | condensation (RCC1) and BTB | | | | | | | | |
| | | | (POZ) domain containing protein 2 | | | | | | | | |
| WAN008DAW_x_at | 1.512859 | RPN1 | Ribophorin I | Hs.518244 | 1E−13 | 91.66667 | 32.43243 | Mm.188544 | 8E−26 | 91.30435 | 49.72973 |
| (SEQ ID NO: 1914) | | | | | | | | | | | |
| WAN013HVB_at | 1.569859 | RNF10 | Ring finger protein 10 | Hs.442798 | 1E−180 | 92.22462 | 80.66202 | Mm.30051 | 1E−158 | 89.56159 | 83.44948 |
| (SEQ ID NO: 1915) | | | | | | | | | | | |
| WAN0088WO_at | 1.976285 | RBM5 | RNA binding motif protein 5 | Hs.439480 | 1E−123 | 93.44262 | 62.37219 | Mm.259197 | 1E−134 | 90.17857 | 91.61554 |
| (SEQ ID NO: 1916) | | | | | | | | | | | |
| WAN008DX4_at | 1.506024 | AHCYL1 | S-adenosylhomocysteine | Hs.485365 | 2E−38 | 93.85965 | 34.65046 | Mm.220328 | 8E−49 | 97.3913 | 34.95441 |
| (SEQ ID NO: 1917) | | | hydrolase-like 1 | | | | | | | | |
| WAN008CR3_at | 1.851852 | SCYL2 | SCY1-like 2 (S. cerevisiae) | Hs.506481 | 1E−120 | 90.2507 | 99.44598 | Mm.27651 | 1E−116 | 90.05682 | 97.50693 |
| (SEQ ID NO: 1918) | | | | | | | | | | | |
| M74776_at | 1.745201 | SERPINA6 | Serpin peptidase inhibitor, clade | Hs.532635 | 0.000006 | 88.46154 | 9.42029 | Mm.290079 | 8E−10 | 82.20339 | 21.37681 |
| (SEQ ID NO: 1919) | | | A (alpha-1 antiproteinase, | | | | | | | | |
| | | | antitrypsin), member 6 | | | | | | | | |
| WAN008EHX_at | 1.594896 | Setd8 | SET domain containing (lysine | Hs.572262 | 1E−141 | 86.65448 | 100 | Mm.137966 | 0 | 89.76234 | 100 |
| (SEQ ID NO: 1920) | | | methyltransferase) 8 | | | | | | | | |
| WAN008DL0_at | 1.66113 | SRP68 | Signal recognition particle 68 kDa | Hs.514495 | 1E−170 | 89.1791 | 96.40288 | Mm.29655 | 0 | 92.85714 | 98.20144 |
| (SEQ ID NO: 1921) | | | | | | | | | | | |
| WAN008EVC_at | 1.694915 | SMYD5 | SMYD family member 5 | Hs.631882 | 1E−85 | 87.19512 | 97.32938 | Mm.219946 | 1E−106 | 89.93902 | 97.32938 |
| (SEQ ID NO: 1922) | | | | | | | | | | | |
| WAN013HU2_at | 1.515152 | SHOC2 | Soc-2 suppressor of clear | Hs.104315 | 1E−161 | 90.12605 | 94.82072 | Mm.228669 | 1E−123 | 86.17234 | 99.40239 |
| (SEQ ID NO: 1923) | | | homolog (C. elegans) | | | | | | | | |
| WAN00BDZS_at | 1.620746 | SLC4A7 | Solute carrier family 4, sodium | Hs.250072 | 0 | 90.19608 | 100 | Mm.258893 | 0 | 95.18717 | 100 |
| (SEQ ID NO: 1924) | | | bicarbonate cotransporter, | | | | | | | | |
| | | | member 7 | | | | | | | | |
| WAN008CMM_at | 1.73913 | SF3B2 | Splicing factor 3b, subunit 2, | Hs.406423 | 1E−142 | 88.4696 | 84.87544 | Mm.196532 | 0 | 91.23435 | 99.46619 |
| (SEQ ID NO: 1925) | | | 145 kDa | | | | | | | | |
| WAN013HVW_at | 1.988072 | Scd1 | Stearoyl-Coenzyme A | #N/A | 0 | 0 | 0 | Mm.193096 | 8E−07 | 88.67925 | 9.330986 |
| (SEQ ID NO: 1926) | | | desaturase 1 | | | | | | | | |
| U22819_s_at | 2.207506 | SREBF2 | Sterol regulatory element | Hs.443258 | 1E−118 | 89.83516 | 99.45355 | Mm.38016 | 1E−133 | 92.39437 | 96.99454 |
| (SEQ ID NO: 1927) | | | binding transcription factor 2 | | | | | | | | |
| WAN008E8B_at | 1.512859 | TAOK2 | TAO kinase 2 | Hs.291623 | 0 | 91.35135 | 100 | Mm.259634 | 0 | 95.13514 | 100 |
| (SEQ ID NO: 1928) | | | | | | | | | | | |
| WAN008DMR_f_at | 1.506024 | Taok3 | TAO kinase 3 | #N/A | 1E−141 | 90.97744 | 100 | Mm.248296 | 1E−180 | 95.20202 | 99.24812 |
| (SEQ ID NO: 1929) | | | | | | | | | | | |
| WAN008DIO_at | 1.824818 | TIPARP | TCDD-inducible poly(ADP- | Hs.12813 | 1E−114 | 88.65979 | 69.90991 | Mm.246398 | 1E−180 | 89.8917 | 99.81982 |
| (SEQ ID NO: 1930) | | | ribose) polymerase | | | | | | | | |
| WAN0013HV0_at | 3.021148 | TXNRD1 | Thioredoxin reductase 1 | Hs.567352 | 5E−94 | 80.21583 | 96.02763 | Mm.210155 | 1E−105 | 84.29561 | 74.78411 |
| (SEQ ID NO: 1931) | | | | | | | | | | | |
| AF022945-rc_f_at | 1.592357 | Thbd | Thrombomodulin | Hs.2030 | 0 | 0 | 0 | Mm.24096 | 1E−13 | 89.55224 | 65.04854 |
| (SEQ ID NO: 1666) | | | | | | | | | | | |
| WAN013I3R_at | 2.881844 | THRAP4 | Thyroid hormone receptor | Hs.462983 | 2E−63 | 89.15094 | 37.65542 | Mm.248493 | 6E−89 | 91.80328 | 43.33925 |
| (SEQ ID NO: 1932) | | | associated protein 4 | | | | | | | | |
| WAN008DOW_at | 2.717391 | TRIP12 | Thyroid hormone receptor | Hs.591633 | 3E−45 | 87.30159 | 91.74757 | Mm.209265 | 1E−74 | 92.23301 | 100 |
| (SEQ ID NO: 1933) | | | interactor 12 | | | | | | | | |
| L19142_f_at | 2.624672 | TFRC | Transferrin receptor (p90, CD71) | Hs.529618 | 1E−128 | 85.6102 | 68.28358 | Mm.28683 | 0 | 90.125 | 99.50249 |
| (SEQ ID NO: 1851) | | | | | | | | | | | |
| WAN008CZR_at | 1.512859 | TMED1 | Transmembrane emp24 protein | Hs.515139 | 1E−139 | 87.57515 | 90.72727 | Mm.196618 | 0 | 94.89194 | 92.54545 |
| (SEQ ID NO: 1746) | | | transport domain containing 1 | | | | | | | | |
| WAN008D6R_at | 1.519757 | TMED4 | Transmembrane emp24 protein | Hs.510745 | 1E−110 | 91.23377 | 72.30047 | Mm.254495 | 1E−145 | 92.41192 | 86.61972 |
| (SEQ ID NO: 1604) | | | transport domain containing 4 | | | | | | | | |
| WAN008EVD_at | 1.526718 | UBE3B | Ubiquitin protein ligase E3B | Hs.374067 | 1E−116 | 89.88764 | 78.76106 | Mm.28792 | 1E−133 | 91.85393 | 78.76106 |
| (SEQ ID NO: 1934) | | | | | | | | | | | |
| WAN008E4F_at | 1.893939 | USP9X | Ubiquitin specific peptidase 9, X- | Hs.77578 | 1E−180 | 91.45129 | 100 | Mm.242646 | 0 | 94.63221 | 100 |
| (SEQ ID NO: 1935) | | | linked | | | | | | | | |
| WAN013HVL_at | 1.579779 | UGDH | UDP-glucose dehydrogenase | Hs.572518 | 1E−165 | 90.06772 | 95.88745 | Mm.344831 | 1E−158 | 89.01099 | 98.48485 |
| (SEQ ID NO: 1639) | | | | | | | | | | | |
| WAN0088P2_at | 1.923077 | UAP1 | UDP-N-acteylglucosamine | Hs.492859 | 1E−130 | 86.73267 | 91.98543 | Mm.27969 | 1E−177 | 90.01883 | 96.72131 |
| (SEQ ID NO: 1853) | | | phyrophosphorylase 1 | | | | | | | | |
| WAN008EH0_at | 2.024291 | YES1 | V-yes-1 Yamaguchi sarcoma | Hs.194148 | 1E−81 | 92.79279 | 100 | Mm.4558 | 1E−86 | 93.69369 | 100 |
| (SEQ ID NO: 1936) | | | viral oncogene homolog 1 | | | | | | | | |
| WAN008EC3_at | 1.519757 | WDFY3 | WD repeat and FYVE domain | Hs.480116 | 4E−31 | 89.34426 | 24.64646 | Mm.332522 | 1E−57 | 87.86408 | 41.61616 |
| (SEQ ID NO: 1937) | | | containing 3 | | | | | | | | |
| WAN008ERE_x_at | 2.336449 | WDR67 | WD repeat domain 67 | Hs.492716 | 9E−36 | 86.12717 | 98.29545 | Mm.390835 | 2E−57 | 91.32948 | 98.29545 |
| (SEQ ID NO: 1855) | | | | | | | | | | | |
| WAN008E97_at | 1.569859 | WDR76 | WD repeat domain 76 | Hs.250154 | 6E−20 | 83.01887 | 52.82392 | #N/A | 1E−37 | 87.5 | 53.15615 |
| (SEQ ID NO: 1938) | | | | | | | | | | | |
| X56207_at | 1.703578 | NA | X56207 Hamster gene for | #N/A | 0 | 0 | 0 | #N/A | 0.00005 | 92.10526 | 6.713781 |
| (SEQ ID NO: 1696) | | | myosin heavy chain, exons 1 & 2 | | | | | | | | |
| X65592_at | 1.54321 | NA | X65592 C. griseus DNA | #N/A | 0 | 0 | 0 | #N/A | 0 | 0 | 0 |
| (SEQ ID NO: 1939) | | | sequence for interstitial telomere | | | | | | | | |
| | | | associated sequence 1 | | | | | | | | |
| WAN008DKJ_x_at | 1.615509 | Zfp297b | Zinc finger protein 297B | #N/A | 1E−27 | 91.57895 | 90.47619 | Mm.44186 | 2E−24 | 89.69072 | 92.38095 |
| (SEQ ID NO: 1697) | | | | | | | | | | | |

### Example 10

### Platform Analysis

[0148] Four cell lines were analyzed from the Platform Process category that exhibit a desired metabolic phenotype when cultured in fed batch culture. That is, the cell lines maintain high viability, and consume lactate and ammonia late in fed batch culture. Multiple time points were collected for each cell line grown in fed batch culture. The time points from each cell line were examined by ANOVA analysis to monitor the changes in gene expression over the course of the culture. The gene lists from each cell line were compared, and those that were in common between all 4 cell lines were identified. Exemplary nucleic acid sequences are listed in Table 20.

TABLE 20
PlatForm Analysis

| | | | Human | | | | Mouse | | | |
|---|---|---|---|---|---|---|---|---|---|---|
| Qualifier List | Symbol | Title | Unigene ID | eValue | % ID | % QC | Unigene ID | eValue | % ID | % QC |
| AF022941_x_at | Cirbp | Cold inducible RNA binding protein | Hs.634522 | 9E−27 | 93.65079 | 69.61326 | Mm.17898 | 1E−52 | 96.26866 | 74.03315 |
| (SEQ ID NO: 1761) | | | | | | | | | | |
| AF081141_at | CCL2 | Chemokine (C-C motif) ligand 2 | Hs.303649 | 3E−13 | 90.625 | 13.41719 | Mm.290320 | 5E−41 | 91.04478 | 28.09224 |
| (SEQ ID NO: 1667) | | | | | | | | | | |
| AF254572_at | ORC1L | Origin recognition complex, subunit 1-like (yeast) | Hs.17908 | 0 | 85.62005 | 63.06156 | Mm.294154 | 0 | 89.31624 | 97.33777 |
| (SEQ ID NO: 1940) | | | | | | | | | | |
| L00366_x_at | TK1 | Thymidine kinase 1, soluble | Hs.515122 | 4E−18 | 89.87342 | 84.94624 | Mm.2661 | 1E−16 | 88.75 | 86.02151 |
| (SEQ ID NO: 1941) | | | | | | | | | | |
| M12329_at | NA | M12329 Chinese hamster alpha-tubulin III mRNA, complete cds. | #N/A | 0 | 93.01676 | 54.28355 | #N/A | 0 | 96.47391 | 53.75284 |
| (SEQ ID NO: 1942) | | | | | | | | | | |
| M80243-rc_at | BIRC5 | Baculoviral IAP repeat-containing 5 (survivin) | Hs.514527 | 4E−38 | 92.37288 | 20.34483 | Mm.8552 | 1E−36 | 93.45794 | 18.44828 |
| (SEQ ID NO: 1943) | | | | | | | | | | |
| U11790_at | KIF2C | Kinesin family member 2C | Hs.69360 | 0 | 89.25714 | 66.43888 | Mm.247651 | 0 | 92.51055 | 71.98178 |
| (SEQ ID NO: 1944) | | | | | | | | | | |
| U48852_at | CRELD2 | Cysteine-rich with EGF-like domains 2 | Hs.211282 | 1E−109 | 81.76944 | 55.13673 | Mm.292567 | 0 | 88.79936 | 91.7221 |
| (SEQ ID NO: 1502) | | | | | | | | | | |
| WAN0088J9_x_at | NA | WAN0088J9 10595A-E01 | #N/A | 0 | 0 | 0 | #N/A | 0 | 0 | 0 |
| (SEQ ID NO: 1588) | | | | | | | | | | |
| WAN0088K2_at | DUSP16 | Dual specificity phosphatase 16 | Hs.536535 | 0.00002 | 84.44444 | 15.98579 | Mm.3994 | 4E−21 | 87.5 | 22.73535 |
| (SEQ ID NO: 1945) | | | | | | | | | | |
| WAN0088ON_at | ATAD2 | ATPase family, AAA domain containing 2 | Hs.370834 | 2E−45 | 83.7037 | 59.08096 | Mm.221758 | 9E−71 | 87.31884 | 60.39387 |
| (SEQ ID NO: 1946) | | | | | | | | | | |
| WAN0088Q6_at | NA | WAN0088Q6 10595D-A09 | #N/A | 1E−153 | 93.71585 | 63.43154 | #N/A | 0 | 94.43155 | 74.69671 |
| (SEQ ID NO: 1590) | | | | | | | | | | |
| WAN0088S8_at | SLC29A1 | Solute carrier family 29 (nucleoside transporters), | Hs.25450 | 3E−35 | 81.35593 | 76.12903 | Mm.29744 | 5E−97 | 86.09756 | 88.17204 |
| (SEQ ID NO: 1591) | | member 1 | | | | | | | | |
| WAN0088T7_at | Cyp51 | Cytochrome P450, family 51 | #N/A | 1E−132 | 86.87873 | 98.05068 | Mm.46044 | 1E−152 | 88.51485 | 98.44055 |
| (SEQ ID NO: 1504) | | | | | | | | | | |
| WAN0088U6_at | SPAG5 | Sperm associated antigen 5 | Hs.514033 | 1E−108 | 84.43649 | 98.07018 | Mm.24250 | 1E−153 | 87.12522 | 99.47368 |
| (SEQ ID NO: 1947) | | | | | | | | | | |
| WAN0088X5_at | MAD2L1 | MAD2 mitotic arrest deficient-like 1 (yeast) | Hs.591697 | 1E−111 | 87.4092 | 93.01802 | Mm.290830 | 1E−153 | 90.95128 | 97.07207 |
| (SEQ ID NO: 1948) | | | | | | | | | | |
| WAN008906_at | Zfp259 | Zinc finger protein 259 | #N/A | 1E−162 | 90.1354 | 94.86239 | Mm.17519 | 0 | 92.84404 | 100 |
| (SEQ ID NO: 1833) | | | | | | | | | | |
| WAN00893Z_at | NA | WAN00893Z 10599B-D03 | #N/A | 8E−33 | 85.87571 | 30.62284 | #N/A | 3E−77 | 88.25503 | 51.55709 |
| (SEQ ID NO: 1949) | | | | | | | | | | |
| WAN008BNE_x_at | NA | WAN008BNE 11233D-H09 | #N/A | 0 | 0 | 0 | #N/A | 0 | 0 | 0 |
| (SEQ ID NO: 1950) | | | | | | | | | | |
| WAN008BNO_at | 2810025M15Rik | RIKEN cDNA 2810025M15 gene | #N/A | 9E−08 | 83.90805 | 15.90494 | Mm.286863 | 1E−146 | 88.09524 | 92.13894 |
| (SEQ ID NO: 1951) | | | | | | | | | | |
| WAN008BRX_at | RETSAT | Retinol saturase (all-trans-retinol 13,14-reductase) | Hs.440401 | 5E−74 | 83.52403 | 80.18349 | Mm.305108 | 0 | 91.37615 | 100 |
| (SEQ ID NO: 1952) | | | | | | | | | | |
| WAN008BSS_at | ATAD2 | ATPase family, AAA domain containing 2 | Hs.370834 | 7E−51 | 86.74699 | 61.63366 | Mm.221758 | 8E−71 | 91.34615 | 51.48515 |
| (SEQ ID NO: 1867) | | | | | | | | | | |
| WAN008CI5_at | CDC20 | CDC20 cell division cycle 20 homolog (S. cerevisiae) | Hs.524947 | 1E−105 | 89.21283 | 68.6 | Mm.289747 | 1E−142 | 93.58601 | 68.6 |
| (SEQ ID NO: 1839) | | | | | | | | | | |
| WAN008CLU_at | Emp1 | Epithelial membrane protein 1 | Hs.436298 | 0 | 0 | 0 | Mm.182785 | 3E−28 | 90.16393 | 21.66963 |
| (SEQ ID NO: 1953) | | | | | | | | | | |
| WAN008CRT_at | ALG14 | Asparagine-linked glycosylation 14 homolog | Hs.408927 | 4E−47 | 88.39779 | 32.43728 | Mm.269881 | 5E−51 | 88.77005 | 33.51254 |
| (SEQ ID NO: 1954) | | (yeast) | | | | | | | | |
| WAN008CS2_at | VKORC1L1 | Vitamin K epoxide reductase complex, subunit | Hs.427232 | 1E−168 | 91.89189 | 96.73203 | Mm.288718 | 0 | 97.28507 | 96.2963 |
| (SEQ ID NO: 1694) | | 1-like 1 | | | | | | | | |
| WAN008CSG_at | Mthfd1 | Methylenetetrahydrofolate dehydrogenase | Hs.614936 | 1E−147 | 86.8705 | 100 | Mm.29584 | 0 | 90.57971 | 99.28058 |
| (SEQ ID NO: 1955) | | (NADP+ dependent), methenyltetrahydrofolate | | | | | | | | |
| | | cyclohydrolase, formyltetrahydrofolate synthase | | | | | | | | |
| WAN008CT2_at | NA | WAN008CT2 10602B-C08 | #N/A | 2E−98 | 92.39544 | 47.0483 | #N/A | 1E−112 | 94.05204 | 48.12165 |
| (SEQ ID NO: 1956) | | | | | | | | | | |
| WAN008CTA_at | NOLC1 | Nucleolar and coiled-body phosphoprotein 1 | Hs.523238 | 1E−101 | 89.12387 | 59.63964 | Mm.402190 | 3E−28 | 89.90826 | 19.63964 |
| (SEQ ID NO: 1957) | | | | | | | | | | |
| WAN008CVX_at | CDC20 | CDC20 cell division cycle 20 homolog (S. cerevisiae) | Hs.524947 | 1E−169 | 90.6639 | 85.15901 | Mm.289747 | 0 | 92.30769 | 87.27915 |
| (SEQ ID NO: 1958) | | | | | | | | | | |
| WAN008CX4_at | MCM5 | MCM5 minichromosome maintenance | Hs.517582 | 1E−152 | 87.10247 | 100 | Mm.5048 | 0 | 91.48936 | 99.64664 |
| (SEQ ID NO: 1959) | | deficient 5, cell division cycle 46 (S. cerevisiae) | | | | | | | | |
| WAN008CXZ_at | UMPS | Uridine monophosphate synthetase (orotate | Hs.2057 | 1E−135 | 86.13139 | 99.63636 | Mm.13145 | 0 | 91.43898 | 99.81818 |
| (SEQ ID NO: 1960) | | phosphoribosyl transferase and orotidine-5′- | | | | | | | | |
| | | decarboxylase) | | | | | | | | |
| WAN008CYY_at | BUB1B | BUB1 budding uninhibited by benzimidazoles | Hs.631699 | 4E−34 | 81.32184 | 73.10924 | Mm.29133 | 2E−71 | 84.59384 | 75 |
| (SEQ ID NO: 1961) | | 1 homolog beta (yeast) | | | | | | | | |
| WAN008CZP_at | NA | WAN008CZP 10604A-A08 | #N/A | 3E−29 | 90.65421 | 21.44289 | #N/A | 7E−50 | 82.69231 | 62.52505 |
| (SEQ ID NO: 1962) | | | | | | | | | | |
| WAN008D06_at | MCM4 | MCM4 minichromosome maintenance | Hs.460184 | 1E−159 | 87.97814 | 98.21109 | Mm.1500 | 0 | 92.98561 | 99.46333 |
| (SEQ ID NO: 1963) | | deficient 4 (S. cerevisiae) | | | | | | | | |
| WAN008D31_at | Lss | Lanosterol synthase | Hs.596543 | 1E−80 | 85.30184 | 68.27957 | Mm.55075 | 1E−150 | 91.52542 | 74.01434 |
| (SEQ ID NO: 1964) | | | | | | | | | | |
| WAN008D7X_at | NA | WAN008D7X 11164B-D06 | #N/A | 4E−16 | 88.23529 | 16.73228 | #N/A | 1E−109 | 91.23377 | 60.62992 |
| (SEQ ID NO: 1965) | | | | | | | | | | |
| WAN008DBR_at | LUC7L | LUC7-like (S. cerevisiae) | Hs.16803 | 0 | 93.66197 | 100 | Mm.386921 | 0 | 95.07042 | 100 |
| (SEQ ID NO: 1966) | | | | | | | | | | |
| WAN008DGK_at | CHAF1A | Chromatin assembly factor 1, subunit A (p150) | Hs.79018 | 1E−83 | 91.32231 | 57.89474 | Mm.391010 | 1E−101 | 90.84746 | 70.57416 |
| (SEQ ID NO: 1967) | | | | | | | | | | |
| WAN008DK1_at | UQCRC1 | Ubiquinol-cytochrome c reductase core protein I | Hs.119251 | 3E−69 | 85.66879 | 64.87603 | Mm.335460 | 1E−110 | 91.0828 | 64.87603 |
| (SEQ ID NO: 1829) | | | | | | | | | | |
| WAN008DMP_at | EWSR1 | Ewing sarcoma breakpoint region 1 | Hs.374477 | 1E−157 | 90.52863 | 94.19087 | Mm.142822 | 0 | 92.98246 | 94.60581 |
| (SEQ ID NO: 1968) | | | | | | | | | | |
| WAN008DO3_at | ACIN1 | Apoptotic chromatin condensation inducer 1 | Hs.124490 | 2E−54 | 89.2562 | 62.85714 | Mm.297078 | 2E−59 | 84.94318 | 91.42857 |
| (SEQ ID NO: 1969) | | | | | | | | | | |
| WAN008DRM_at | EPHX1 | Epoxide hydrolase 1, microsomal (xenobiotic) | Hs.89649 | 9E−85 | 87.98701 | 60.39216 | Mm.9075 | 1E−113 | 91.22257 | 62.54902 |
| (SEQ ID NO: 1503) | | | | | | | | | | |
| WAN008DWL_at | NEK2 | NIMA (never in mitosis gene a)-related kinase 2 | Hs.153704 | 1E−71 | 87.38739 | 58.42105 | Mm.33773 | 1E−152 | 89.13934 | 85.61404 |
| (SEQ ID NO: 1896) | | | | | | | | | | |
| WAN008DXL_at | NA | WAN008DXL 11229A-C02 | #N/A | 5E−58 | 89.74359 | 44.72477 | #N/A | 2E−83 | 94.92386 | 45.18349 |
| (SEQ ID NO: 1970) | | | | | | | | | | |
| WAN008DZY_at | MCM7 | MCM7 minichromosome maintenance | Hs.438720 | 3E−99 | 88.37209 | 100 | Mm.241714 | 1E−123 | 91.27907 | 100 |
| (SEQ ID NO: 1971) | | deficient 7 (S. cerevisiae) | | | | | | | | |
| WAN008E3C_at | Ptma | Prothymosin alpha | Hs.459927 | 2E−67 | 93.83886 | 44.98934 | Mm.19187 | 1E−148 | 92.74005 | 91.04478 |
| (SEQ ID NO: 1972) | | | | | | | | | | |
| WAN008E3O_at | LINCR | Likely ortholog of mouse lung-inducible | Hs.149219 | 3E−19 | 84.61538 | 38.0117 | Mm.389110 | 3E−76 | 85.33724 | 99.7076 |
| (SEQ ID NO: 1973) | | Neutralized-related C3HC4 RING domain protein | | | | | | | | |
| WAN008E4X_at | NA | WAN008E4X 11230A-D06 | #N/A | 0 | 0 | 0 | #N/A | 0 | 0 | 0 |
| (SEQ ID NO: 1974) | | | | | | | | | | |
| WAN008E4Z_at | Nup153 | Nucleoporin 153 | Hs.601591 | 1E−169 | 89.96063 | 92.53188 | Mm.255398 | 0 | 93.75 | 99.08925 |
| (SEQ ID NO: 1975) | | | | | | | | | | |
| WAN008E5L_at | SLC1A5 | Solute carrier family 1 (neutral amino acid | Hs.631582 | 8E−42 | 84.16667 | 45.62738 | Mm.1056 | 1E−115 | 87.67123 | 83.26996 |
| (SEQ ID NO: 1619) | | transporter), member 5 | | | | | | | | |
| WAN008E65_at | ERP29 | Endoplasmic reticulum protein 29 | Hs.75841 | 1E−164 | 91.04803 | 79.79094 | Mm.154570 | 1E−171 | 90.98532 | 83.10105 |
| (SEQ ID NO: 1976) | | | | | | | | | | |
| WAN008E6I_at | NA | WAN008E6I 11230B-F07 | #N/A | 1E−43 | 88.95706 | 42.22798 | #N/A | 3E−76 | 85.38682 | 90.41451 |
| (SEQ ID NO: 1977) | | | | | | | | | | |
| WAN008EED_at | Sc5d | Sterol-C5-desaturase (fungal ERG3, delta-5- | #N/A | 2E−42 | 85.44601 | 40.72658 | Mm.32700 | 9E−99 | 87.70492 | 69.98088 |
| (SEQ ID NO: 1521) | | desaturase) homolog (S. cerevisae) | | | | | | | | |
| WAN008EJV_at | Racgap1 | Rac GTPase-activating protein 1 | Hs.645513 | 1E−103 | 86.39618 | 93.31849 | Mm.273804 | 1E−133 | 89.31116 | 93.76392 |
| (SEQ ID NO: 1978) | | | | | | | | | | |
| WAN008EK5- | NA | WAN008EK5 11232A-G08 | #N/A | 2E−35 | 92.66055 | 26.65037 | #N/A | 6E−44 | 94.78261 | 28.11736 |
| rc_f_at | | | | | | | | | | |
| (SEQ ID NO: 1979) | | | | | | | | | | |
| WAN008EML_at | PBK | PDZ binding kinase | Hs.104741 | 5E−52 | 89.50276 | 39.09287 | Mm.24337 | 3E−80 | 89.78102 | 59.17927 |
| (SEQ ID NO: 1980) | | | | | | | | | | |
| WAN008EMN_at | NA | WAN008EMN 11232B-E01 | #N/A | 0 | 0 | 0 | #N/A | 0 | 0 | 0 |
| (SEQ ID NO: 1981) | | | | | | | | | | |
| WAN008EP0_at | NA | WAN008EP0 11232C-B07 | #N/A | 0 | 0 | 0 | #N/A | 0.00003 | 95.12195 | 10.90426 |
| (SEQ ID NO: 1982) | | | | | | | | | | |
| WAN008ET3_at | NA | WAN008ET3 11233A-C09 | #N/A | 3E−47 | 85.65574 | 50.30928 | #N/A | 1E−133 | 89.27739 | 88.45361 |
| (SEQ ID NO: 1983) | | | | | | | | | | |
| WAN008ETA_at | Usp40 | Ubiquitin specific peptidase 40 | Hs.96513 | 0 | 0 | 0 | Mm.80484 | 3E−46 | 84.72222 | 50.08696 |
| (SEQ ID NO: 1984) | | | | | | | | | | |
| WAN008EXF_at | KIF11 | Kinesin family member 11 | Hs.8878 | 4E−28 | 86.86131 | 27.56539 | Mm.42203 | 3E−24 | 91.86047 | 17.30382 |
| (SEQ ID NO: 1985) | | | | | | | | | | |
| WAN008F1A_at | CYC1 | Cytochrome c-1 | Hs.289271 | 1E−124 | 86.82008 | 89.34579 | Mm.29196 | 0 | 92.42424 | 98.69159 |
| (SEQ ID NO: 1986) | | | | | | | | | | |
| WAN013HV4_at | NA | Cluster includes WAN008F09 10599A-D09 | #N/A | 5E−09 | 97.2973 | 7.07457 | #N/A | 5E−20 | 86.92308 | 24.8566 |
| (SEQ ID NO: 1987) | | | | | | | | | | |
| WAN013HVE_at | NARS | Asparaginyl-tRNA synthetase | Hs.465224 | 1E−104 | 85.0211 | 79.5302 | Mm.29192 | 0 | 92.22904 | 82.04698 |
| (SEQ ID NO: 1988) | | | | | | | | | | |
| WAN013HW1_at | Eef1d | Eukaryotic translation elongation factor 1 delta | Hs.333388 | 1E−115 | 84.05797 | 99.45946 | Mm.258927 | 0 | 91.24088 | 98.73874 |
| (SEQ ID NO: 1989) | | (guanine nucleotide exchange protein) | | | | | | | | |
| WAN013HW5_at | RPL10A | Ribosomal protein L10a | Hs.546269 | 1E−164 | 89.09465 | 98.98167 | Mm.336955 | 0 | 91.85336 | 100 |
| (SEQ ID NO: 1990) | | | | | | | | | | |
| WAN013HWL_at | EBP | Emopamil binding protein (sterol isomerase) | Hs.632801 | 6E−21 | 84.17266 | 24.86583 | Mm.27183 | 2E−46 | 91.9708 | 24.50805 |
| (SEQ ID NO: 1991) | | | | | | | | | | |
| WAN013HX8_x_at | EIF4A2 | Eukaryotic translation initiation factor 4A, | Hs.518475 | 2E−75 | 94.08602 | 68.50829 | Mm.260084 | 0 | 92.50936 | 98.34254 |
| (SEQ ID NO: 1490) | | isoform 2 | | | | | | | | |
| WAN013HXG_at | NA | Cluster includes WAN008CY6 10604A-H03 | #N/A | 1E−103 | 88.0814 | 62.54545 | #N/A | 1E−118 | 89.14286 | 63.63636 |
| (SEQ ID NO: 1992) | | | | | | | | | | |
| WAN013HZA_at | CSE1L | CSE1 chromosome segregation 1-like (yeast) | Hs.90073 | 1E−180 | 88.51351 | 100 | Mm.22417 | 0 | 93.07432 | 100 |
| (SEQ ID NO: 1993) | | | | | | | | | | |
| WAN013I03_at | RPL8 | Ribosomal protein L8 | Hs.178551 | 1E−166 | 88.00705 | 97.92746 | Mm.30066 | 0 | 92.91883 | 100 |
| (SEQ ID NO: 1994) | | | | | | | | | | |
| WAN013I06_at | NA | Cluster includes WAN008E0Q 11229C-H06 | #N/A | 1E−111 | 85.15284 | 84.34622 | #N/A | 1E−143 | 87.71552 | 85.4512 |
| (SEQ ID NO: 1995) | | | | | | | | | | |
| WAN013I0L_at | SND1 | Staphylococcal nuclease domain containing 1 | Hs.122523 | 1E−156 | 87.89683 | 99.40828 | #N/A | 0 | 91.51874 | 100 |
| (SEQ ID NO: 1996) | | | | | | | | | | |
| WAN013I2L_at | NA | Cluster includes WAN0088QX 10596B-F05 | #N/A | 0 | 0 | 0 | #N/A | 0 | 0 | 0 |
| (SEQ ID NO: 1651) | | | | | | | | | | |
| WAN013I2T_at | CBX5 | Chromobox homolog 5 (HP1 alpha homolog, | Hs.632724 | 1E−142 | 91.86352 | 72.02268 | Mm.262059 | 1E−168 | 94.75066 | 72.02268 |
| (SEQ ID NO: 1652) | | Drosophila) | | | | | | | | |
| WAN013I3N_at | NA | Cluster includes WAN00893W 10599B-D08 | #N/A | 6E−29 | 87.31343 | 40.36145 | #N/A | 7E−76 | 92.57426 | 60.84337 |
| (SEQ ID NO: 1997) | | | | | | | | | | |
| WAN013I5T_at | CCNB1 | Cyclin B1 | Hs.23960 | 1E−93 | 85.30259 | 28.11994 | Mm.260114 | 1E−110 | 87.17949 | 28.44408 |
| (SEQ ID NO: 1998) | | | | | | | | | | |
| WAN013I6G_at | NA | Cluster includes M12252 Chinese hamster | #N/A | 0 | 0 | 0 | #N/A | 0 | 0 | 0 |
| (SEQ ID NO: 1999) | | alpha-tubulin I mRNA, complete cds. | | | | | | | | |
| WAN013I81_at | POLD1 | Polymerase (DNA directed), delta 1, catalytic | Hs.279413 | 0 | 86.30952 | 98.31748 | Mm.16549 | 0 | 91.73372 | 100 |
| (SEQ ID NO: 1905) | | subunit 125 kDa | | | | | | | | |
| WAN013I8D_at | PARP1 | Poly (ADP-ribose) polymerase family, member 1 | Hs.177766 | 2E−43 | 85.57692 | 35.01684 | Mm.277779 | 1E−102 | 87.78055 | 67.50842 |
| (SEQ ID NO: 2000) | | | | | | | | | | |
| WAN013I8J_at | CCNB2 | Cyclin B2 | Hs.194698 | 1E−173 | 86.9258 | 44.39216 | Mm.22592 | 0 | 90.70946 | 46.43137 |
| (SEQ ID NO: 2001) | | | | | | | | | | |
| WAN013I8N_at | IMPDH2 | IMP (inosine monophosphate) dehydrogenase 2 | Hs.476231 | 0 | 90.28974 | 95.36968 | Mm.6065 | 0 | 93.18358 | 96.41524 |
| (SEQ ID NO: 1776) | | | | | | | | | | |
| WAN013I8R_at | Rps2 | Ribosomal protein S2 | Hs.356366 | 0 | 90.22298 | 99.14966 | Mm.157452 | 0 | 95.05119 | 99.65986 |
| (SEQ ID NO: 2002) | | | | | | | | | | |
| WAN013I9O_at | TUBB6 | Tubulin, beta 6 | Hs.193491 | 0 | 92.2528 | 71.39738 | Mm.181860 | 0 | 91.74573 | 76.71033 |
| (SEQ ID NO: 2003) | | | | | | | | | | |
| WAN013I9R_at | NA | Cluster includes Y08202 C. griseus mRNA for | #N/A | 1E−104 | 84.573 | 63.46154 | #N/A | 1E−142 | 88.98072 | 63.46154 |
| (SEQ ID NO: 2004) | | RAD51 protein | | | | | | | | |
| WAN013IAD_at | TOP2A | Topoisomerase (DNA) II alpha 170 kDa | Hs.156346 | 3E−37 | 80.62678 | 29.52061 | Mm.4237 | 1E−86 | 84.11633 | 37.59462 |
| (SEQ ID NO: 2005) | | | | | | | | | | |
| WAN013IAQ- | CDKN1A | Cyclin-dependent kinase inhibitor 1A (p21, | Hs.370771 | 2E−10 | 100 | 14.1129 | Mm.195663 | 1E−31 | 88.88889 | 50.80645 |
| rc_x_at | | Cip1) | | | | | | | | |
| (SEQ ID NO: 2006) | | | | | | | | | | |
| X83575_at | KIF23 | Kinesin family member 23 | Hs.270845 | 1E−177 | 92.47788 | 37.07957 | Mm.259374 | 0 | 91.99372 | 52.25595 |
| (SEQ ID NO: 2007) | | | | | | | | | | |
| X83576_at | KIFC1 | Kinesin family member C1 | Hs.436912 | 0 | 86.77111 | 86.84807 | Mm.335713 | 0 | 90.52369 | 90.92971 |
| (SEQ ID NO: 2292) | | | | | | | | | | |

### Example 11

### Target Validation: siRNA

[0149] The ability of the differentially expressed genes and proteins to affect a cellular phenotype is verified by overexpression of a nucleic acid inhibiting the expression of the relevant gene using methods known in the art. Exemplary methods based on interfering RNA constructs are described below.

Design and Synthesis of siRNA

[0150] Typically, targets that are candidates for siRNA mediated gene knockdown are sequenced, and the sequences verified. Full-length cDNA sequence information is preferred (although not required) to facilitate siRNAs design. The target sequence that is a candidate for gene knockdown is compared to gene sequences available on public or proprietary databases (e.g., BLAST search). Sequences within the target gene that overlap with other known sequences (for example, 16-17 contiguous basepairs of homology) are generally not suitable targets for specific siRNA-mediated gene knockdown.

[0151] siRNAs may be designed using, for example, online design tools, over secure internet connections, such as the one available on the Ambion® website (http://www.ambion.com/techlib/misc/siRNA_finder.html). Alternatively, custom siRNAs may also be requested from Ambion®, which applies the Cenix algorithm for designing effective siRNAs. The standard format for siRNAs is typically 5 nmol, annealed and with standard purity in plates. Upon receipt of synthesized siRNAs, the siRNAs are prepared according to the instructions provided by the manufacture and stored at the appropriate temperature (−20° C.)

[0152] Standard procedures were used for siRNA transfections. Cells to be transfected were typically pre-passaged on the day before transfection to ensure that the cells are in logarithmic growth phase. Typically, an siRNA Fed-Batch assay was used. Exemplary materials, conditions and methods for transfections are as follows.

[0153] Transfection (D0)

[0154] Per Spin Tube (50 ml)

[0155] 100 uL R1

[0156] 2 uL Transit-TKO transfection reagent (Mirus)

[0157] 10 uL 10 uM siRNA

[0158] 2 mL 1 e5 cells/mL in AS1 medium

[0159] Following Transfection

[0160] 37° C.: 72 hrs

[0161] 31° C.: 96 hrs

[0162] Feed: AQ3 on day 3 (D3)

[0163] Sample taken on day 1 (D1), day 3 (D3), day 7 (D7)

24 Well Suspension Transfections

[0164] For each experiment, 100,000 cells (e.g., 3C7 cells) in 1 mL total volume, and 50 nM siRNA were used. To make a mix for 3 reactions, 150 μL R1 and 70 μL Mirus TKO reagent were mixed and incubated for 10 minutes at room temperature. 15 μL of 10 μM siRNA was added and the mix was incubated for 10 minutes at room temperature. 57.3 μL of the mix was transferred into each of 3 wells. 942.7 μL of R5CD1 (containing 100,000 cells) was added and the plate was incubated on rocker at 37° C. for 72 hrs.

Spin Tube siRNA Transfection

[0165] For each experiment, 100,000 cells (e.g., 3C7 cells) in 1 mL total volume were used. For each transfection, 100 μL R1 and 2 μL Mirus TKO reagent were mixed and incubated for 10 minutes at room temperature. 10 μL of 10 μM siRNA was added and the mix was incubated for 15 minutes at room temperature, mixed occasionally. 1.9 mL culture was transferred to each spin tube. siRNA mix (112 uL) was added to each spin tube. The culture was initially incubated at 37° C. and then the temperature was shifted to 31° C. on day 3. Spin tube cultures were shaken rapidly (˜250 RPM). Samples were taken on days 1, 3, and 7. Cultures were terminated on day 7.

[0166] Growth and productivity controls were included on each plate. An exemplary productivity control is DHFR (selectable marker on bicistronic mRNA). Treatment with DHFR siRNA reproducibly decreases amount of antibody in the CM-FcIGEN (antibody production control). An exemplary growth control is CHO1 (kinesin) (see Matuliene et al. (2002) Mol. Cell. Biol. 13:1832-45) (typically, about 20-30% growth inhibition was observed with CHO1 treatment). Other standard controls such as no siRNA treatment (transfection reagents only) and non-targeting siRNA treatment (non-specific siRNA) were also included. Plates were then subjected to cell counting (for example, in a 96-well cell counting instrument) to assess growth and to, for example, an automated 96-well titer assay, to assess productivity. Genes whose modulation, singly or in combination, are sufficient to modify useful cellular phenotypes were thereby validated and such changes can be engineered, singly or in combination, into a mammalian cell line to modify its properties.

[0167] Model cell lines used for the validation purposes and their characteristics are shown in Table 21. FIGS. 143-146 summarize the evaluation of some of the target genes in the spin tube format in the 3C7 cell line. Target genes evaluated include D299 (WAN01318K), identified above as elevated in cells with elevated growth rates; EIF4B, identified above as elevated in cells with elevated growth rates; HSP27 (HSPB1), identified above as elevated in cells with elevated growth rates; MCP1 (CCL2), identified above as depressed in cells with high cell density; NAAT1 (SLC1A4), identified above as depressed in cells with elevated growth rates; MMD1 (malate dehydrogenase), identified above as depressed in cells with high maximum cellular productivities; MATF-4 (ATF-4), identified above as elevated in cells with high cell densities; and SCoA Ligase (SUCLG2), identified above as elevated in cells with high cell densities. As shown in FIG. 143, for genes identified as elevated in cells with elevated growth rates, inhibition of the gene led to an inhibition of growth relative to the control. Cellular productivity was generally not comparably affected, as shown in FIG. 144.

TABLE 21
Cell lines and their characteristics

| Clone | Characteristics |
|---|---|
| 1.14 | High growth rate; Low Qp |
| 1.18 | Average |
| 2.8 | High Qp; High cell density |
| 2B6 | Low cell density; Low Qp |
| DA-4 | Low cell density; Low GR |
| DD-11 | Average |
| DE-6 | Average |
| 3B12 | High Qp; High cell density |
| 5C10 | Average |
| 5B5 | Low Qp |
| 3C7 | Average |

### Example 12

### Target Validation: Overexpression

[0168] The ability of the differentially expressed genes and proteins to affect a cellular phenotype is verified by overexpression of a nucleic acid encoding the expression of the relevant gene using methods known in the art. Exemplary methods are described below.

[0169] For example, nucleic acids overexpressing specific targets can be introduced into CHO cells by transient transfections and then the impact of over-expression on cellular growth and productivity are monitored. An exemplary protocol, 24 well format, was illustrated in FIGS. 147 and 148.

[0170] Growth and productivity controls are typically used for overexpression assays. For example, positive growth/viability control used in this experiment included Ha-Ras and Bcl-xL. Negative growth control used included p27. Other suitable growth and productivity controls are known in the art and can be used for overexpression assays. Additional standard controls such as no nucleic acid control (transfection reagents only) were also included.

[0171] Target genes and the control genes were cloned into the pExpress1 vector and introduced into various model cell lines as shown in Table 22.

TABLE 22
Cell lines for the assay and their characteristics

| Clone | Characteristics |
|---|---|
| 1.18 | Middle of the road |
| 5C10 | Middle of the road |
| DE-6 | Middle of the road |
| DD-11 | Middle of the road |
| 1.14 | HCGR, sustained high viability, not |
| | sustained high Qp, Not low NH4, |
| | Not high cell density |
| 2.8 | High max Qp, sustained high Qp |
| 3B12 | High max Qp, sustained high Qp, |
| | high cell density, low lactate |
| DA-4 | Not HCGR, Not high cell density |
| 5B5 | Not sustained high Qp, Not low |
| | lactate |
| 2B6 | Not high cell density, Not high max |
| | Qp |

[0172] The 24 well format was used to distinguish phenotypic effects of transient transfection of various genes on various cell lines. Cellular growth and productivity were determined. Exemplary results are illustrated in FIGS. 149-151. It was found that results were generally representative and reproducible. Exemplary overexpression results are summarized in Table 23.

TABLE 23
Summary of the overexpression assays

| Gene over- | Cell line | Growth | Productivity | |
|---|---|---|---|---|
| expressed | tested | phenotype | phenotype | |
| P27 | | | Titer | Qp |
| | 1.14 | ↓ (− − −) | NA | NA |
| | 1.18 | ↓ (−) | NA | NA |
| | 5C10 | ↓ (− −) | ↓ (− −) | ↑ (−) |
| | 5B5 | ↓ (− − −) | ↓ (− −) | ↑ (−) |
| | 3B12 | ↓ (− − −) | NA | NA |
| | 2B6 | ↓ (− − −) | NA | NA |
| | 2.8 | ↓ (−) | NA | NA |
| | DE-6 | ↓ (− −) | NA | NA |
| | DD-11 | ↓ (− −) | NA | NA |
| Bcl-xL | 5B5 | ↑ (+ + +) | ↑ (+ +) | No change |
| H-Ras | 5C10 | ↓ (− −) | ↓ (− −) | No change |
| | 5B5 | ↓ (− − −) | ↓ (− −) | ↓ (−) |
| | 3B12 | ↓ (− −) | NA | NA |
| 3A (EIF4B) | 5C10 | ↑ (+) | ↑ (+) | No change |
| | 5B5 | ↑ (+) | ↑ (+) | No change |

NA = Not tested or awaiting results
(* * *) Strongly increased or decreased
(* *) Increased or decreased
(*) moderately increased or decreased

### Example 13

### Engineering Cell Lines to Improve Cell Phenotypes Based on the Verified Target Genes

[0173] The verified target genes are used to effect a cell phenotype, particularly a phenotype characterized by increased and efficient production of a recombinant transgene, increased cell growth rate, high peak cell density, sustained high cell viability, high maximum cellular productivity, sustained high cellular productivity, low ammonium production, and low lactate production, etc. Exemplary target genes are disclosed above, for example, in Tables 2 through 20 and in Tables 24 through 30.

TABLE 24

| | | | | | | | | | | | | |
|---|---|---|---|---|---|---|---|---|---|---|---|---|
| | | | Human | | | | Mouse | | | | | |
| Qualifier List | Symbol | Title | Unigene ID | eValue | % ID | % QC | Unigene ID | eValue | % ID | % QC | FC | Function |

High Cell Growth
Rate

| | | | | | | | | | | | | |
|---|---|---|---|---|---|---|---|---|---|---|---|---|
| U62588_x_at | SDC1 | Syndecan 1 | Hs.224607 | 1E−32 | 93 | 53.2 | Mm.2580 | 7E−48 | 91 | 81.4 | down | Adhesion |
| (SEQ ID NO: 1586) | | | | | | | | | | | | |
| WAN008D2Q_at | Eif4b | Eukaryotic translation initiation factor | #N/A | 6E−49 | 93 | 29.4 | Mm.290022 | 1E−129 | 91 | 71.6 | up | translation (initiation) |
| (SEQ ID NO: 1561) | | 4B (Eif4b) | | | | | | | | | | |
| WAN008DJ9_at | SLC1A4 | Solute carrier family 1 | Hs.323878 | 2E−39 | 87 | 39.5 | Mm.6379 | 1E−121 | 89 | 90.6 | down | serine transporter |
| (SEQ ID NO: 1565) | | (glutamate/neutral amino acid | | | | | | | | | | |
| | | transporter), member 4 | | | | | | | | | | |
| WAN013I0W_at | TAPBP | TAP binding protein (tapasin) | Hs.370937 | 2E−57 | 81 | 93.2 | Mm.154457 | 1E−149 | 87 | 95.3 | down | ER peptide transporter |
| (SEQ ID NO: 1580) | | | | | | | | | | | | |
| WAN013I0X_at | GSS | Glutathione synthetase | Hs.82327 | 3E−96 | 90 | 56.1 | Mm.252316 | 1E−129 | 95 | 55.7 | down | glutathione synthesis |
| (SEQ ID NO: 1581) | | | | | | | | | | | | (protect from oxidative |
| | | | | | | | | | | | | stress) |
| WAN013I1G_at | SLC25A20 | Solute carrier family 25 | Hs.13845 | 1E−137 | 87 | 87.7 | Mm.29666 | 0 | 92 | 86.4 | down | fatty acid translocation |
| (SEQ ID NO: 1582) | | (carnitine/acylcarnitine translocase), | | | | | | | | | | across mitochondrial |
| | | member 20 | | | | | | | | | | membrane |
| WAN013I8K_at | NA | Cluster includes D29972 Cricetulus | #N/A | | | | #N/A | | | | up | |
| (SEQ ID NO: 1584) | | griseus mitochondrial DNA, D-loop | | | | | | | | | | |
| | | region. | | | | | | | | | | |
| X51747_at | HSPB1 | Heat shock 27 kDa protein 1 | Hs.520973 | 1E−101 | 87 | 50.5 | Mm.13849 | 0 | 92 | 66.1 | up | UPR |
| (SEQ ID NO: 1587) | | | | | | | | | | | | |
| WAN008EE0_x_at | Ndufs1 | NADH dehydrogenase (ubiquinone) | Hs.471207 | | | | Mm.290791 | | | | up | electron transport in |
| (SEQ ID NO: 1789) | | Fe—S protein 1 | | | | | | | | | | Mitochondria |

High Cell Density

| | | | | | | | | | | | | |
|---|---|---|---|---|---|---|---|---|---|---|---|---|
| AF022945-rc_f_at | Thbd | Thrombomodulin | Hs.2030 | | | | Mm.24096 | 1E−13 | 90 | 65 | up | thrombin binding |
| (SEQ ID NO: 1666) | | | | | | | | | | | | |
| AF081141_at | CCL2 | Chemokine (C-C motif) ligand 2 | Hs.303649 | 1E−12 | 98 | 9.01 | Mm.290320 | 6E−41 | 91 | 28.1 | down | cytokine; inflammation |
| (SEQ ID NO: 1667) | | | | | | | | | | | | |
| M27838_s_at | ASNS | Asparagine synthetase | Hs.489207 | 0 | 89 | 100 | Mm.2942 | 0 | 92 | 100 | up | aparagine synthesis |
| (SEQ ID NO: 1670) | | | | | | | | | | | | |
| U29167_at | TPM2 | Tropomyosin 2 (beta) | Hs.300772 | 0 | 93 | 88.8 | Mm.646 | 0 | 95 | 90.3 | up | focal adhesion |
| (SEQ ID NO: 1672) | | | | | | | | | | | | |
| WAN0088X2_at | PEO1 | Progressive external ophthalmoplegia 1 | Hs.22678 | 1E−141 | 89 | 94.5 | Mm.105585 | 7E−78 | 91 | 47.8 | up | mitochondrial DNA |
| (SEQ ID NO: 1593) | | | | | | | | | | | | helicase |
| WAN008CQP_at | AATF | Apoptosis antagonizing transcription | Hs.195740 | 6E−73 | 84 | 99.3 | Mm.257482 | 8E−99 | 86 | 99.3 | up | |
| (SEQ ID NO: 1598) | | factor | | | | | | | | | | |
| WAN008CX9_at | ISGF3G | Interferon-stimulated transcription | Hs.1706 | 2E−64 | 83 | 81.5 | Mm.2032 | 1E−119 | 88 | 88.5 | up | |
| (SEQ ID NO: 1599) | | factor 3, gamma 48 kDa | | | | | | | | | | |
| WAN008CXC_at | ATP6V0A1 | ATPase, H+ transporting, lysosomal | Hs.463074 | 0 | 93 | 99.4 | Mm.340818 | 0 | 94 | 100 | down | acidification of |
| (SEQ ID NO: 1600) | | V0 subunit a isoform 1 | | | | | | | | | | intracellular organelles |
| WAN008D2S_at | BPY2IP1 | BPY2 interacting protein 1 | Hs.66048 | 6E−15 | 84 | 21 | Mm.248559 | 1E−101 | 87 | 69 | down | microtubule binding |
| (SEQ ID NO: 1601) | | | | | | | | | | | | |
| WAN008D55-rc_at | LAMB1 | Laminin, beta 1 | Hs.489646 | 1E−155 | 88 | 97.5 | Mm.172674 | 1E−161 | 92 | 77.7 | 1up, | glycoprotein; cell |
| (SEQ ID NO: 1603) | | | | | | | | | | | 1down | adhesion |
| WAN008D5V_x_at | Gosr2 | Golgi SNAP receptor complex | Hs.463278 | | | | Mm.195451 | 1E−08 | 90 | 43.6 | down | transporter; golgi |
| (SEQ ID NO: 1562) | | member 2, mRNA (cDNA clone | | | | | | | | | | trafficking |
| | | MGC: 6437 IMAGE: 3601627) | | | | | | | | | | |
| WAN008D6R_at | TMED4 | Transmembrane emp24 protein | Hs.510745 | 1E−111 | 91 | 73.7 | Mm.254495 | 1E−140 | 92 | 86.6 | down | transporter; unknown |
| (SEQ ID NO: 1604) | | transport domain containing 4 | | | | | | | | | | function |
| WAN008DMI_at | ACSL5 | Acyl-CoA synthetase long-chain family | Hs.11638 | 1E−118 | 85 | 96.6 | #N/A | 0 | 90 | 99.6 | up | lipid biosynthesis; fatty |
| (SEQ ID NO: 1610) | | member 5 | | | | | | | | | | acid degradation |
| WAN008DWJ_at | USP1 | Similar to ubiquitin specific protease 1 | Hs.35086 | 0 | 93 | 97 | Mm.371692 | 0 | 94 | 96.5 | up | de-ubiquitinating |
| (SEQ ID NO: 1614) | | | | | | | | | | | | enzyme |
| WAN008E5L_at | SLC1A5 | Solute carrier famliy 1 (neutral | Hs.515494 | 8E−42 | 84 | 45.6 | Mm.1056 | 1E−115 | 88 | 83.3 | up | amino acid |
| (SEQ ID NO: 1619) | | amino acid transporter), member 5 | | | | | | | | | | transporter |
| WAN008E9N_at | KLHL7 | Kelch-like 7 (Drosophila) | Hs.385861 | 1E−150 | 89 | 99.4 | Mm.273768 | 0 | 93 | 89.1 | down | unknown function |
| (SEQ ID NO: 1620) | | | | | | | | | | | | |
| WAN008EBP_at | Sqstm1 | Sequestosome 1 | Hs.529892 | 0 | 93 | 97.8 | Mm.40828 | 0 | 93 | 97.8 | down | ubiquitin-associated |
| (SEQ ID NO: 1621) | | | | | | | | | | | | protein |
| WAN008EH5_at | PRNP | Prion protein (p27-30) (Creutzfeld- | Hs.472010 | 9E−45 | 87 | 34.8 | Mm.648 | 4E−92 | 90 | 57.2 | down | |
| (SEQ ID NO: 1622) | | Jakob disease, Gerstmann- | | | | | | | | | | |
| | | Strausler-Scheinker Syndrome, | | | | | | | | | | |
| | | fatal familial insomnia) | | | | | | | | | | |
| WAN008ELE_at | PSAT1 | Phosphoserine aminotransferase 1 | Hs.494261 | 7E−27 | 93 | 16.2 | Mm.289936 | 5E−70 | 88 | 58.2 | up | serine biosynthesis |
| (SEQ ID NO: 1626) | | | | | | | | | | | | |
| WAN008EM4_at | ARHGAP18 | Rho GTPase activating protein 18 | Hs.486458 | 1E−109 | 85 | 97.9 | Mm.356496 | 1E−147 | 88 | 100 | down | unknown function |
| (SEQ ID NO: 1627) | | | | | | | | | | | | |
| WAN008EOB_at | NOL1 | Nucleolar protein 1, 120 kDa | Hs.534334 | 8E−48 | 90 | 42.5 | Mm.29203 | 1E−120 | 87 | 92.2 | up | cell cycle progression |
| (SEQ ID NO: 1629) | | | | | | | | | | | | |
| WAN008ERI_at | FNBP3 | Formin binding protein 3 | Hs.298735 | 4E−81 | 97 | 98.9 | Mm.257474 | 2E−94 | 99 | 100 | down | pre-mRNA processing |
| (SEQ ID NO: 1632) | | | | | | | | | | | | |
| WAN008ERP_at | LEPREL1 | Leprecan-like 1 | Hs.374191 | 1E−45 | 87 | 92.8 | Mm.326869 | 1E−68 | 89 | 94 | down | negative regulation of |
| (SEQ ID NO: 1634) | | | | | | | | | | | | cell proliferation(?) |
| WAN008EUO_at | LPL | Lipoprotein lipase | Hs.180878 | 2E−82 | 88 | 74.1 | Mm.1514 | 1E−113 | 92 | 74.1 | down | glycerolipid metabolism |
| (SEQ ID NO: 1635) | | | | | | | | | | | | |
| WAN008F1P_x_at | NA | WAN008F1P 11165A-A01 | #N/A | | | | #N/A | | | | down | Homologs in new array, |
| (SEQ ID NO: 1637) | | | | | | | | | | | | but +/− in most cases, |
| | | | | | | | | | | | | and none of these have |
| | | | | | | | | | | | | any homology |
| WAN013HW0_x_at | NA | Cluster includes WAN008CO3 | #N/A | | | | #N/A | | | | up | Appears to be |
| (SEQ ID NO: 1640) | | 10600D-F02 | | | | | | | | | | mitochondrial |
| | | | | | | | | | | | | polycistronic mRNA!!! |
| WAN013HX8_f_at | EIF4A2 | Eukaryotic translation initiation factor | Hs.478553 | 1E−155 | 96 | 100 | Mm.260084 | 1E−155 | 96 | 100 | down | translation initiation |
| (SEQ ID NO: 1490) | | 4A, isoform 2 | | | | | | | | | | |
| WAN013I1U_x_at | NA | Cluster includes WAN008BLL | #N/A | 2E−05 | 92 | 7.71 | #N/A | 1E−05 | 92 | 7.71 | up | |
| (SEQ ID NO: 1648) | | 11233C-H10 | | | | | | | | | | |
| WAN013I2T_at | CBX5 | Chromobox homolog 5 (HP1 alpha | Hs.349283 | 1E−142 | 92 | 72 | Mm.262059 | 1E−168 | 95 | 72 | up | chromatin binding |
| (SEQ ID NO: 1652) | | homolog, Drosophila) | | | | | | | | | | |
| WAN013I6J_s_at | CAD | Carbamoyl-phosphate synthetase 2, | Hs.377010 | 0 | 91 | 99.5 | Mm.305535 | 0 | 94 | 99.5 | up | pyrimidine biosynthesis |
| (SEQ ID NO: 1657) | | aspartate transcarbamylase, and | | | | | | | | | | |
| | | dihydroorotase | | | | | | | | | | |
| WAN013I8X_at | HSPD1 | Heat shock 60 kDa protein 1 | Hs.113684 | 0 | 90 | 99.8 | Mm.1777 | 0 | 93 | 99.8 | up | molecular chaperone |
| (SEQ ID NO: 1661) | | (chaperonin) | | | | | | | | | | |
| WANO13I9Z_at | GNAS | guanine nucleotide binding protein, | Hs.125898 | | | | Mm.125770 | 0 | 94 | 41.1 | down | cell growth |
| (SEQ ID NO: 1664) | | alpha stimulating | | | | | | | | | | |
| WAN013I9F_at | HSPA9B | Heat shock protein 9A | Hs.184233 | 3E−29 | 92 | 18.7 | Mm.209419 | 2E−72 | 91 | 44.8 | up | cell proliferation |
| (SEQ ID NO: 1662) | | | | | | | | | | | | |

High Max Qp

| | | | | |
|---|---|---|---|---|
| gi\|34853001 | Uap1l1 | PREDICTED: similar to UDP-N- | Mm.33797 | −2.22 |
| | | acteylglucosamine pyrophosphorylase 1-like 1 | | |

Sustained High Cell
Viability

| | | | | | | | | | | | |
|---|---|---|---|---|---|---|---|---|---|---|---|
| AF022942_at | Cirbp | Cold inducible RNA binding protein | Hs.634522 | 8E−40 | 86 | 86.5 | Mm.17898 | 9E−94 | 95 | 100 | up |
| (SEQ ID NO: 2008) | | | | | | | | | | | |
| AF120325_f_at | TUBB2B | Tubulin, beta 2B | Hs.300701 | 0 | 89 | 72.7 | #N/A | 0 | 92 | 78.5 | up |
| (SEQ ID NO: 1753) | | | | | | | | | | | |
| M12329_at | NA | M12329 Chinese hamster alpha- | #N/A | 0 | 93 | 54.3 | #N/A | 0 | 96 | 53.8 | up |
| (SEQ ID NO: 1942) | | tubulin III mRNA, complete cds. | | | | | | | | | |
| M96676_at | LGALS1 | Lectin, galactoside-binding, soluble, 1 | Hs.445351 | 1E−122 | 89 | 100 | Mm.43831 | 1E−131 | 90 | 100 | up |
| (SEQ ID NO: 1727) | | (galectin 1) | | | | | | | | | |
| WAN0088YL_f_at | 2700085E05Rik | RIKEN cDNA 2700085E05 gene | #N/A | 2E−58 | 91 | 96.5 | Mm.249700 | 4E−77 | 94 | 100 | up |
| (SEQ ID NO: 2009) | | | | | | | | | | | |
| WAN008CZP_at | NA | WAN008CZP 10604A-A08 | #N/A | 3E−29 | 91 | 21.4 | #N/A | 7E−50 | 83 | 62.5 | up |
| (SEQ ID NO: 1962) | | | | | | | | | | | |
| WAN008E65_at | ERP29 | Endoplasmic reticulum protein 29 | Hs.75841 | 1E−164 | 91 | 79.8 | Mm.154570 | 1E−171 | 91 | 83.1 | up |
| (SEQ ID NO: 1976) | | | | | | | | | | | |
| WAN008940_at | MRPL37 | Mitochondrial ribosomal protein L37 | Hs.584908 | 5E−68 | 86 | 54.6 | Mm.29517 | 1E−102 | 90 | 60.7 | down |
| (SEQ ID NO: 2010) | | Glioma tumor suppressor candidate | | | | | | | | | |
| WAN008CQI_at | GLTSCR2 | region gene 2 | Hs.421907 | 1E−113 | 86 | 100 | Mm.277634 | 1E−175 | 91 | 100 | down |
| (SEQ ID NO: 2011) | | | | | | | | | | | |
| WAN008DAG_at | AARS | Alanyl-tRNA synthetase | Hs.315137 | 1E−101 | 89 | 70.7 | Mm.24174 | 1E−134 | 92 | 74.7 | down |
| (SEQ ID NO: 2012) | | | | | | | | | | | |
| WAN008DSH_at | MRPL16 | Mitochondrial ribosomal protein L16 | Hs.530734 | 1E−37 | 85 | 40 | Mm.203928 | 4E−64 | 90 | 42.4 | down |
| (SEQ ID NO: 2013) | | | | | | | | | | | |
| WAN008DXE_x_at | SLC6A8 | Solute carrier family 6 | Hs.540696 | 1E−59 | 95 | 99.3 | Mm.274553 | 1E−64 | 97 | 99.3 | down |
| (SEQ ID NO: 2014) | | (neurotransmitter transporter, | | | | | | | | | |
| | | creatine), member 8 | | | | | | | | | |
| WAN008E2E_at | PSMC4 | Proteasome (prosome, macropain) | Hs.211594 | 1E−153 | 92 | 100 | Mm.29582 | 1E−141 | 91 | 100 | down |
| (SEQ ID NO: 1567) | | 26S subunit, ATPase, 4 | | | | | | | | | |
| WAN008E5L_at | SLC1A5 | Solute carrier family 1 (neutral amino | Hs.631582 | 8E−42 | 84 | 45.6 | Mm.1056 | 1E−115 | 88 | 83.3 | down |
| (SEQ ID NO: 1619) | | acid transporter), member 5 | | | | | | | | | |
| WAN008EE3_at | SARS | Seryl-tRNA synthetase | Hs.531176 | 1E−116 | 91 | 100 | Mm.28688 | 1E−136 | 93 | 100 | down |
| (SEQ ID NO: 1809) | | | | | | | | | | | |
| WAN013HVH_at | GARS | Glycyl-tRNA synthetase | Hs.404321 | 1E−177 | 88 | 100 | Mm.250004 | 0 | 94 | 100 | down |
| (SEQ ID NO: 2015) | | | | | | | | | | | |
| WAN013I1O_at | RNH1 | Ribonuclease/angiogenin inhibitor 1 | Hs.530687 | 1E−18 | 83 | 27.8 | Mm.279485 | 1E−91 | 88 | 61.2 | down |
| (SEQ ID NO: 1804) | | | | | | | | | | | |
| WAN013I1Q_at | TXNL2 | Thioredoxin-like 2 | Hs.42644 | 2E−90 | 89 | 53.5 | Mm.267692 | 1E−126 | 94 | 53.8 | down |
| (SEQ ID NO: 2016) | | | | | | | | | | | |
| WAN008EE5_at | PANX1 | Pannexin 1 | Hs.591976 | 1E−125 | 89 | 100 | Mm.142253 | 1E−177 | 94 | 100 | down |
| (SEQ ID NO: 2017) | | | | | | | | | | | |

Sustained High Qp

| | | | | | | | | | | | |
|---|---|---|---|---|---|---|---|---|---|---|---|
| WAN013HUM_at | EHD4 | EH-domain containing 4 | Hs.143703 | 1E−95 | 93 | 59 | Mm.132226 | 1E−125 | 89 | 99.5 | up |
| (SEQ ID NO: 1576) | | | | | | | | | | | |
| AB014875_at | PLS3 | plastin 3 (T isoform) | Hs.496622 | 1E−159 | 92 | 31.6 | Mm.28777 | 1E−175 | 90 | 40.7 | down |
| (SEQ ID NO: 1734) | | | | | | | | | | | |
| WAN0088PY_at | NA | WAN0088PY 10595D-B07 | Hs.279806 | 0 | 0 | 0 | Mm.220038 | 2E−07 | 93 | 9.23 | down |
| (SEQ ID NO: 1480) | | | | | | | | | | | |
| WAN008CIU_at | NA | WAN008CIU 10599D-C10 | #N/A | 0 | 0 | 0 | #N/A | 1E−05 | 100 | 5.79 | down |
| (SEQ ID NO: 2018) | | | | | | | | | | | |
| WAN008EYO_at | NA | WAN008EYO 11233B-B05 | #N/A | 0 | 0 | 0 | #N/A | 3E−09 | 89 | 12.4 | down |
| (SEQ ID NO: 2019) | | | | | | | | | | | |
| WAN008CIA_at | EIF1AY | Eukaryotic translation initiation factor | Hs.461178 | 1E−137 | 91 | 72 | Mm.294623 | 1E−164 | 89 | 99.6 | up |
| (SEQ ID NO: 2020) | | 1A, Y-linked | | | | | | | | | |
| WAN008D6O_at | STRBP | Spermatid perinuclear RNA binding | Hs.645506 | 9E−62 | 90 | 67.7 | Mm.237095 | 3E−94 | 95 | 71 | up |
| (SEQ ID NO: 1692) | | protein | | | | | | | | | |
| WAN008DNJ_at | Rbmxrt | RNA binding motif protein, X | Hs.380118 | 1E−131 | 92 | 71 | Mm.24718 | 0 | 95 | 97.9 | up |
| (SEQ ID NO: 2021) | | chromosome retrogene | | | | | | | | | |
| WAN008DWF_f_at | NA | WAN008DWF 11229A-H02 | #N/A | 0 | 0 | 0 | #N/A | 0 | 0 | 0 | up |
| (SEQ ID NO: 2022) | | | | | | | | | | | |
| WAN013HUG_at | CDKN2C | Cyclin-dependent kinase inhibitor 2C | Hs.525324 | 1E−113 | 95 | 53.7 | Mm.1912 | 1E−142 | 99 | 53.1 | up |
| (SEQ ID NO: 2023) | | (p18, inhibits CDK4) | | | | | | | | | |
| WAN0088OY_x_at | HNRPF | Heterogeneous nuclear | Hs.558477 | 1E−87 | 99 | 95.8 | Mm.317706 | 1E−98 | 100 | 100 | down |
| (SEQ ID NO: 2024) | | ribonucleoprotein F | | | | | | | | | |
| WAN013I8H_x_at | APP | Amyloid beta (A4) precursor protein | Hs.642685 | 1E−77 | 84 | 83.5 | Mm.277585 | 1E−167 | 88 | 100 | down |
| (SEQ ID NO: 1548) | | (protease nexin-II, Alzheimer disease) | | | | | | | | | |
| X53074_f_at | HPRT1 | Hypoxanthine | Hs.412707 | 5E−35 | 93 | 47.4 | Mm.299381 | 7E−36 | 93 | 47.8 | down |
| (SEQ ID NO: 2025) | | phosphoribosyltransferase 1 (Lesch- | | | | | | | | | |
| | | Nyhan syndrome) | | | | | | | | | |
| WAN008EJ7_at | EIF5A | Eukaryotic translation initiation factor | Hs.534314 | 0 | 99 | 100 | Mm.196607 | 0 | 98 | 100 | down |
| (SEQ ID NO: 2026) | | 5A | | | | | | | | | |

Low Ammonia
Producer

| | | | | | | | | | | | |
|---|---|---|---|---|---|---|---|---|---|---|---|
| AF180918_at | KLHL5 | Kelch-like 5 (Drosophila) | Hs.272251 | 6E−21 | 89 | 19.8 | Mm.10281 | 5E−48 | 86 | 49.2 | up |
| (SEQ ID NO: 1778) | | | | | | | | | | | |
| WAN013HW0_x_at | NA | Cluster includes WAN008CO3 | #N/A | 0 | 0 | 0 | #N/A | 0 | 0 | 0 | up |
| (SEQ ID NO: 1640) | | 10600D-F02 | | | | | | | | | |
| WAN013I8U_at | NA | Cluster includes M14311 Chinese | #N/A | 2E−05 | 92 | 20.3 | #N/A | 0 | 0 | 0 | up |
| (SEQ ID NO: 2027) | | Hamster mitochondrial ATPase 6 and | | | | | | | | | |
| | | URF A6L genes, complete cds. | | | | | | | | | |
| AF100738_at | SUI1 | Putative translation initiation factor | #N/A | 8E−09 | 85 | 53.4 | #N/A | 2E−11 | 89 | 30.8 | down |
| (SEQ ID NO: 2028) | | | | | | | | | | | |
| L00176_at | Hmgcr | 3-hydroxy-3-methylglutaryl-Coenzyme | Hs.643495 | 7E−54 | 88 | 57.9 | Mm.316652 | 3E−82 | 94 | 55.4 | down |
| (SEQ ID NO: 1500) | | A reductase | | | | | | | | | |
| L00334_at | Hmgcs1 | 3-hydroxy-3-methylglutaryl-Coenzyme | Hs.397729 | 1E−100 | 88 | 36 | Mm.61526 | 1E−178 | 90 | 45.5 | down |
| (SEQ ID NO: 2029) | | A synthase 1 | | | | | | | | | |
| M29238_at | DDIT3 | DNA-damage-inducible transcript 3 | Hs.505777 | 1E−100 | 87 | 76.8 | Mm.110220 | 1E−119 | 89 | 68.9 | down |
| (SEQ ID NO: 2030) | | | | | | | | | | | |
| M60973_at | GADD45A | Growth arrest and DNA-damage- | Hs.80409 | 0 | 92 | 76.3 | Mm.389750 | 1E−170 | 91 | 49.2 | down |
| (SEQ ID NO: 2031) | | inducible, alpha | | | | | | | | | |
| U29660_s_at | NA | U29660 Cricetulus griseus hydrogen | #N/A | 0 | 0 | 0 | #N/A | 1E−13 | 85 | 8.15 | down |
| (SEQ ID NO: 2032) | | peroxide-inducible adapt33A RNA. | | | | | | | | | |
| U48852_at | CRELD2 | Cysteine-rich with EGF-like domains 2 | Hs.211282 | 1E−109 | 82 | 55.1 | Mm.292567 | 0 | 89 | 91.7 | down |
| (SEQ ID NO: 1502) | | | | | | | | | | | |
| U67146_at | EEF1E1 | Eukaryotic translation elongation | Hs.631818 | 1E−152 | 89 | 63.9 | Mm.36683 | 0 | 90 | 90.4 | down |
| (SEQ ID NO: 1683) | | factor 1 epsilon 1 | | | | | | | | | |
| WAN0088II_at | BNIP2 | BCL2/adenovirus E1B 19 kDa | Hs.283454 | 1E−154 | 89 | 90.3 | Mm.159777 | 0 | 94 | 96 | down |
| (SEQ ID NO: 2033) | | interacting protein 2 | | | | | | | | | |
| WAN0088Z9_at | PLAA | Phospholipase A2-activating protein | Hs.27182 | 1E−148 | 88 | 100 | Mm.22724 | 0 | 94 | 99 | down |
| (SEQ ID NO: 2034) | | | | | | | | | | | |
| WAN008BRV_at | NA | WAN008BRV 11231C-E04 | #N/A | 1E−49 | 94 | 30.1 | #N/A | 8E−99 | 95 | 55.6 | down |
| (SEQ ID NO: 2035) | | | | | | | | | | | |
| WAN008BT4_at | NA | WAN008BT4 11231C-A04 | #N/A | 1E−45 | 85 | 84.1 | #N/A | 8E−64 | 86 | 89 | down |
| (SEQ ID NO: 2036) | | | | | | | | | | | |
| WAN008CF7_at | IVNS1ABP | Influenza virus NS1A binding protein | Hs.497183 | 0 | 93 | 100 | Mm.33764 | 0 | 97 | 100 | down |
| (SEQ ID NO: 1889) | | | | | | | | | | | |
| WAN008CLU_at | Emp1 | Epithelial membrane protein 1 | Hs.436298 | 0 | 0 | 0 | Mm.182785 | 3E−28 | 90 | 21.7 | down |
| (SEQ ID NO: 1953) | | | | | | | | | | | |
| WAN008CPJ_at | Fdft1 | Farnesyl diphosphate farnesyl | Hs.593928 | 1E−123 | 85 | 99.6 | Mm.425927 | 0 | 0 | 0 | down |
| (SEQ ID NO: 1878) | | transferase 1 | | | | | | | | | |
| WAN008CTB_at | TIPRL | TIP41, TOR signalling pathway | Hs.209431 | 3E−69 | 91 | 37.7 | Mm.21520 | 1E−134 | 90 | 73.9 | down |
| (SEQ ID NO: 2037) | | regulator-like (S. cerevisiae) | | | | | | | | | |
| WAN008CVX_at | CDC20 | CDC20 cell division cycle 20 homolog | Hs.524947 | 1E−169 | 91 | 85.2 | Mm.289747 | 0 | 92 | 87.3 | down |
| (SEQ ID NO: 1958) | | (S. cerevisiae) | | | | | | | | | |
| WAN008CW2_at | SRP54 | Signal recognition particle 54 kDa | Hs.167535 | 0 | 92 | 99.6 | Mm.12848 | 0 | 93 | 99.8 | down |
| (SEQ ID NO: 2038) | | | | | | | | | | | |
| WAN008D31_at | Lss | Lanosterol synthase | Hs.596543 | 1E−80 | 85 | 68.3 | Mm.55075 | 1E−150 | 92 | 74 | down |
| (SEQ ID NO: 1964) | | | | | | | | | | | |
| WAN008D4O_at | NA | WAN008D4O 10604D-C05 | #N/A | 0 | 0 | 0 | #N/A | 2E−12 | 93 | 15.3 | down |
| (SEQ ID NO: 2039) | | | | | | | | | | | |
| WAN008DGF_x_at | Ddx5 | DEAD (Asp-Glu-Ala-Asp) box | Hs.279806 | 6E−23 | 96 | 77.9 | Mm.220038 | 1E−34 | 97 | 100 | down |
| (SEQ ID NO: 2040) | | polypeptide 5 | | | | | | | | | |
| WAN008DUZ_at | POP7 | Processing of precursor 7, | Hs.416994 | 6E−52 | 90 | 35.2 | Mm.290242 | 9E−62 | 92 | 35.2 | down |
| (SEQ ID NO: 1689) | | ribonuclease P subunit (S. cerevisiae) | | | | | | | | | |
| WAN008E0W_at | LMAN2 | Lectin, mannose-binding 2 | Hs.75864 | 7E−67 | 87 | 53.8 | Mm.38868 | 1E−130 | 89 | 88.4 | down |
| (SEQ ID NO: 2041) | | | | | | | | | | | |
| WAN008E3R_at | DDX41 | DEAD (Asp-Glu-Ala-Asp) box | Hs.484288 | 1E−176 | 89 | 99.3 | Mm.205045 | 0 | 95 | 100 | down |
| (SEQ ID NO: 2042) | | polypeptide 41 | | | | | | | | | |
| WAN008E4Z_at | Nup153 | Nucleoporin 153 | Hs.601591 | 1E−169 | 90 | 92.5 | Mm.255398 | 0 | 94 | 99.1 | down |
| (SEQ ID NO: 1975) | | | | | | | | | | | |
| WAN008EED_at | Sc5d | Sterol-C5-desaturase (fungal ERG3, | Mm.32700 | 2E−42 | 85 | 40.7 | Mm.32700 | 9E−99 | 88 | 70 | down |
| (SEQ ID NO: 1521) | | delta-5-desaturase) homolog (S. cerevisae) | | | | | | | | | |
| WAN008EXX_at | CCT4 | Chaperonin containing TCP1, subunit | Hs.421509 | 1E−48 | 89 | 55 | Mm.296985 | 3E−54 | 89 | 59.1 | down |
| (SEQ ID NO: 2043) | | 4 (delta) | | | | | | | | | |
| WAN008EXZ_at | NA | WAN008EXZ 11233B-E01 | #N/A | 0 | 0 | 0 | #N/A | 4E−67 | 86 | 68.3 | down |
| (SEQ ID NO: 2044) | | | | | | | | | | | |
| WAN013HUI_at | HIP2 | Huntingtin interacting protein 2 | Hs.50308 | 0 | 97 | 94.8 | Mm.319512 | 0 | 97 | 99.2 | down |
| (SEQ ID NO: 2045) | | | | | | | | | | | |
| WAN013HX4_at | ESD | Esterase D/formylglutathione | Hs.432491 | 1E−158 | 88 | 93.5 | Mm.38055 | 0 | 92 | 93.2 | down |
| (SEQ ID NO: 1578) | | hydrolase | | | | | | | | | |
| WAN013HY6_at | IARS | Isoleucine-tRNA synthetase | Hs.445403 | 1E−127 | 86 | 100 | Mm.21118 | 0 | 92 | 99.2 | down |
| (SEQ ID NO: 2046) | | | | | | | | | | | |
| WAN013HYE_at | Psmd11_predicted | Proteasome (prosome, macropain) | #N/A | 0 | 92 | 100 | #N/A | 0 | 94 | 100 | down |
| (SEQ ID NO: 2047) | | 26S subunit, non-ATPase, 11 | | | | | | | | | |
| | | (predicted) | | | | | | | | | |
| WAN013I88_at | NA | Cluster includes AF003836 | #N/A | 0 | 0 | 0 | #N/A | 8E−32 | 87 | 14 | down |
| (SEQ ID NO: 2048) | | Mesocricetus auratus isopentenyl | | | | | | | | | |
| | | diphosphate:dimethylallyl diphosphate | | | | | | | | | |
| | | isomerase mRNA, complete cds. | | | | | | | | | |
| WAN013I8A_at | NA | Cluster includes AF044676 Cricetulus | #N/A | 0 | 0 | 0 | #N/A | 7E−38 | 86 | 33.3 | down |
| (SEQ ID NO: 2049) | | griseus glucose-6-phosphate | | | | | | | | | |
| | | dehydrogenase mRNA, complete cds. | | | | | | | | | |
| WAN013I8W_at | Hspa5 | Heat shock 70 kD protein 5 (glucose- | Hs.605502 | 0 | 93 | 95.6 | Mm.330160 | 0 | 97 | 100 | down |
| (SEQ ID NO: 2050) | | regulated protein) | | | | | | | | | |
| WAN013I9H_at | HSP90B1 | Heat shock protein 90 kDa beta | Hs.192374 | 1E−104 | 89 | 58.5 | Mm.87773 | 1E−120 | 91 | 59 | down |
| (SEQ ID NO: 2051) | | (Grp94), member 1 | | | | | | | | | |
| WAN013IAD_at | TOP2A | Topoisomerase (DNA) II alpha | Hs.156346 | 3E−37 | 81 | 29.5 | Mm.4237 | 1E−86 | 84 | 37.6 | down |
| (SEQ ID NO: 2005) | | 170 kDa | | | | | | | | | |
| AF221841_at | Prdx1 | Peroxiredoxin 1 | Hs.180909 | 0 | 91 | 100 | Mm.30929 | 0 | 94 | 98.5 | up |
| (SEQ ID NO: 1735) | | | | | | | | | | | |
| WAN008DI8_at | Lmna | Lamin A | #N/A | 0 | 0 | 0 | Mm.243014 | 0 | 93 | 99.8 | up |
| (SEQ ID NO: 2052) | | | | | | | | | | | |
| WAN008DXT_at | SUCLA2 | Succinate-CoA ligase, ADP-forming, | Hs.546323 | 2E−54 | 94 | 34.7 | Mm.38951 | 4E−60 | 96 | 33 | up |
| (SEQ ID NO: 2053) | | beta subunit | | | | | | | | | |

Low Lactate
Producer

| | | | | | | | | | | | |
|---|---|---|---|---|---|---|---|---|---|---|---|
| AF022942_at | Cirbp | Cold inducible RNA binding protein | Hs.634522 | 8E−40 | 86 | 86.5 | Mm.17898 | 9E−94 | 95 | 100 | up |
| (SEQ ID NO: 2008) | | | | | | | | | | | |
| M26640_at | CLU | Clusterin | Hs.436657 | 7E−92 | 83 | 94.6 | Mm.200608 | 0 | 92 | 98.8 | up |
| (SEQ ID NO: 2054) | | | | | | | | | | | |
| WAN0088OY_x_at | Invs | Inversin | Hs.558477 | 1E−87 | 99 | 95.8 | Mm.317706 | 1E−98 | 100 | 100 | down |
| (SEQ ID NO: 2024) | | | | | | | | | | | |
| WAN008CLU_at | Emp1 | Epithelial membrane protein 1 | Hs.436298 | 0 | 0 | 0 | Mm.182785 | 3E−28 | 90 | 21.7 | down |
| (SEQ ID NO: 1953) | | | | | | | | | | | |
| WAN008EED_at | Sc5d | Sterol-C5-desaturase (fungal ERG3, | #N/A | 2E−42 | 85 | 40.7 | Mm.32700 | 9E−99 | 88 | 70 | down |
| (SEQ ID NO: 1521) | | delta-5-desaturase) homolog (S. cerevisae) | | | | | | | | | |
| L00332_at | HMGCS1 | 3-hydroxy-3-methylglutaryl-Coenzyme | Hs.397729 | 3E−41 | 91 | 95.8 | Mm.61526 | 1E−42 | 92 | 88.9 | down |
| (SEQ ID NO: 1862) | | A synthase 1 (soluble) | | | | | | | | | |

Multiple Categories

| | | | | | | | | | | | | |
|---|---|---|---|---|---|---|---|---|---|---|---|---|
| WAN0088K2_at | DUSP16 | Dual specificity phosphatase 16 | Hs.536535 | 2E−05 | 84 | 16 | Mm.3994 | 4E−21 | 88 | 22.7 | down | |
| (SEQ ID NO: 1945) | | | | | | | | | | | | |
| WAN0088JV_at | TRIB3 | Tribbles homolog 3 (Drosophila) | Hs.516826 | 4E−62 | 82 | 86.4 | Mm.276018 | 1E−158 | 89 | 98.1 | down | |
| (SEQ ID NO: 1555) | | | | | | | | | | | | |
| WAN0088OP_at | Hrb2 | HIV-1 Rev binding protein 2 | #N/A | 1E−141 | 88 | 91.2 | #N/A | 0 | 91 | 99.4 | down | |
| (SEQ ID NO: 2055) | | | | | | | | | | | | |
| WAN008BSH_at | CAT | Catalase | Hs.502302 | 6E−16 | 89 | 38.7 | Mm.4215 | 3E−41 | 89 | 85.7 | down | reactive oxygen |
| (SEQ ID NO: 1558) | | | | | | | | | | | | species |
| WAN008BSL_at | PAK1IP1 | PAK1 interacting protein 1 | Hs.310231 | 1E−109 | 90 | 86.1 | Mm.24789 | 4E−91 | 86 | 99.7 | down | |
| (SEQ ID NO: 2056) | | | | | | | | | | | | |
| WAN008CIU_at | NA | WAN008CIU 10599D-C10 | #N/A | 0 | 0 | 0 | #N/A | 1E−05 | 100 | 5.79 | down | |
| (SEQ ID NO: 2018) | | | | | | | | | | | | |
| WAN008CZ6_at | 2010106G01Rik | RIKEN cDNA 2010106G01 gene | #N/A | 1E−125 | 86 | 99.2 | Mm.269928 | 1E−164 | 89 | 100 | down | |
| (SEQ ID NO: 2057) | | | | | | | | | | | | |
| WAN008E89_at | Nup160 | Nucleoporin 160 | Hs.645358 | 0 | 92 | 98.1 | Mm.24532 | 0 | 94 | 99.8 | down | |
| (SEQ ID NO: 1900) | | | | | | | | | | | | |
| WAN008EC4_at | HIAT1 | Hippocampus abundant transcript 1 | Hs.124156 | 1E−140 | 93 | 66 | Mm.280077 | 1E−155 | 95 | 66 | down | |
| (SEQ ID NO: 2058) | | | | | | | | | | | | |
| WAN013HX1_at | SEC13L1 | SEC13-like 1 (S. cerevisiae) | Hs.166924 | 0 | 90 | 99.3 | Mm.29296 | 0 | 90 | 99.3 | down | |
| (SEQ ID NO: 2059) | | | | | | | | | | | | |
| WAN013HXZ_x_at | NA | Cluster includes WAN008DCG | #N/A | 6E−22 | 91 | 46.1 | #N/A | 5E−30 | 97 | 30.6 | down | |
| (SEQ ID NO: 2060) | | 11165C-D11 | | | | | | | | | | |
| WAN013I05_at | Abcb6 | ATP-binding cassette, sub-family B | Hs.107911 | 1E−154 | 87 | 100 | Mm.28663 | 0 | 92 | 100 | down | |
| (SEQ ID NO: 1646) | | (MDR/TAP), member 6 | | | | | | | | | | |
| WAN013I0B_at | NA | Cluster includes WAN008E5C | #N/A | 3E−07 | 83 | 15.6 | #N/A | 6E−22 | 86 | 17.1 | down | |
| (SEQ ID NO: 2061) | | 11230A-B11 | | | | | | | | | | |
| WAN013I1D_x_at | CCNDBP1 | Cyclin D-type binding-protein 1 | Hs.36794 | 2E−67 | 79 | 87 | Mm.7838 | 1E−111 | 82 | 95.1 | down | |
| (SEQ ID NO: 2062) | | | | | | | | | | | | |
| WAN013I1Z_f_at | NA | Cluster includes WAN0088KD | #N/A | 0 | 0 | 0 | #N/A | 0 | 0 | 0 | up | |
| (SEQ ID NO: 2063) | | 10595B-H02 | | | | | | | | | | |
| WAN013I20_x_at | MAFG | V-maf musculoaponeurotic | Hs.252229 | 7E−39 | 83 | 30.8 | Mm.268010 | 2E−50 | 82 | 42.7 | down | |
| (SEQ ID NO: 2064) | | fibrosarcoma oncogene homolog G | | | | | | | | | | |
| | | (avian) | | | | | | | | | | |
| WAN013I31_at | RNF4 | Ring finger protein 4 | Hs.66394 | 8E−67 | 90 | 47.8 | Mm.21281 | 1E−178 | 92 | 95.4 | down | |
| (SEQ ID NO: 2065) | | | | | | | | | | | | |
| X51747_at | HSPB1 | Heat shock 27 kDa protein 1 | Hs.520973 | 1E−101 | 87 | 50.5 | Mm.13849 | 0 | 92 | 66.1 | up | |
| (SEQ ID NO: 1587) | | | | | | | | | | | | |
| WAN008DGD_at | Aplp2 | Amyloid beta (A4) precursor-like | #N/A | | | | Mm.19133 | 7E−69 | 93 | 44.5 | −1.3 | migration; adhesion |
| (SEQ ID NO: 1564) | | protein 2 (Aplp2) | | | | | | | | | | |
| U42430_at | CD36 | CD36 antigen (collagen type I | Hs.120949 | 6E−43 | 86 | 34.3 | Mm.18628 | 2E−57 | 88 | 37.7 | −1.49 | |
| (SEQ ID NO: 1673) | | receptor, thrombospondin receptor) | | | | | | | | | | |
| L00181_at | Hmgcr | 3-hydroxy-3-methylglutaryl-Coenzyme | Hs.643495 | 1E−37 | 90 | 32.7 | Mm.316652 | 3E−52 | 94 | 33.7 | down | |
| (SEQ ID NO: 1510) | | A reductase | | | | | | | | | | |
| U22819_s_at | SREBF2 | Sterol regulatory element binding | Hs.443258 | 1E−118 | 90 | 99.5 | Mm.38016 | 1E−133 | 92 | 97 | down | |
| (SEQ ID NO: 1927) | | transcription factor 2 | | | | | | | | | | |
| L00366_x_at | TK1 | Thymidine kinase 1, soluble | Hs.515122 | 4E−18 | 90 | 84.9 | Mm.2661 | 1E−16 | 89 | 86 | up | |
| (SEQ ID NO: 1941) | | | | | | | | | | | | |

[0174] TABLE 25
High Priority Secondary Gene list

| | | | | Human | |
|---|---|---|---|---|---|
| Qualifier List | Category | Symbol | Title | Unigene ID | eValue |
| AB020230_at | HCD | INTRON | delta-sarcoglycan intron 1 | #N/A | 3E−08 |
| (SEQ ID NO: 1665) | DAG | | | | |
| AF113614_at | HCD | TLR2 | Toll-like receptor 2 | Hs.519033 | 1E−101 |
| (SEQ ID NO: 1668) | DAG | | | | |
| AF320819_at | HCD | BSG | Basigin (OK blood group) | Hs.501293 | 1E−25 |
| (SEQ ID NO: 1669) | DAG | | | | |
| M76730_at | HCD | Col5a1 | Procollagen, type V, alpha 1 | Hs.210283 | 6E−52 |
| (SEQ ID NO: 1671) | DAG | | | | |
| U62588_x_at | HCD | SDC1 | Syndecan 1 | Hs.224607 | 1E−32 |
| (SEQ ID NO: 1586) | DAG | | | | |
| WAN0088J9_x_at | HCD | CCNA2 | cyclin A2 | Hs.85137 | 1.00E−55 |
| (SEQ ID NO: 1588) | DAG | | | | |
| WAN008BRK_at | HCD | Tmsb4x | Thymosin, beta 4, X | Hs.522584 | 1E−153 |
| (SEQ ID NO: 1594) | DAG | | chromosome | | |
| WAN008BSG_x_at | HCD | TRAM1 | Translocation associated | Hs.491988 | 7E−29 |
| (SEQ ID NO: 1595) | DAG | | membrane protein 1 | | |
| WAN008CHP_x_at | HCD | NA | WAN008CHP 10599D-H02 | #N/A | |
| (SEQ ID NO: 1596) | DAG | | | | |
| WAN008D3Z_at | HCD | GALNT7 | UDP-N-acetyl-alpha-D- | Hs.127407 | 1E−135 |
| (SEQ ID NO: 1602) | DAG | | galactosamine: polypeptide N- | | |
| | | | acetylgalactosaminyltransferase | | |
| | | | 7 (GalNAc-T7) | | |
| WAN008DFT_at | HCD | ABHD6 | Abhydrolase domain containing 6 | Hs.476454 | 3E−17 |
| (SEQ ID NO: 1605) | DAG | | | | |
| WAN008DI7_at | HCD | FBXO42 | F-box protein 42 | #N/A | |
| (SEQ ID NO: 1607) | DAG | | | | |
| WAN008DIA_at | HCD | U2AF1 | U2(RNU2) small nuclear RNA | Hs.365116 | 1E−170 |
| (SEQ ID NO: 1608) | DAG | | auxiliary factor 1 | | |
| WAN008DMJ_at | HCD | NAB2 | NGFI-A binding protein 2 (EGR1 | Hs.159223 | 1E−176 |
| (SEQ ID NO: 1611) | DAG | | binding protein 2) | | |
| WAN008DS9_at | HCD | CFL2 | Cofilin 2 (muscle) | Hs.180141 | 1E−113 |
| (SEQ ID NO: 1613) | DAG | | | | |
| WAN008E06_at | HCD | Rabep2 | Rabaptin, RAB GTPase binding | Hs.555978 | 2E−92 |
| (SEQ ID NO: 1616) | DAG | | effector protein 2 | | |
| WAN008EKK_at | HCD | PSMA8 | Proteasome (prosome, | Hs.464813 | 1E−104 |
| (SEQ ID NO: 1625) | DAG | | macropain) subunit, alpha type, 8 | | |
| WAN008END_at | HCD | SCYL1 | SCY1-like 1 (S. cerevisiae) | Hs.238839 | 2E−61 |
| (SEQ ID NO: 1628) | DAG | | | | |
| WAN008EQM_at | HCD | NA | RC WAN008EQM 11232D-D11 | #N/A | |
| (SEQ ID NO: 1630) | DAG | | | | |
| WAN008ERO_at | HCD | SNAG1 | Sorting nexin associated golgi | Hs.432755 | 7E−30 |
| (SEQ ID NO: 1633) | DAG | | protein 1 | | |
| WAN008EY0_at | HCD | C330017I15Rik | RIKEN cDNA C330017I15 gene | HS.520619 | 1E−179 |
| (SEQ ID NO: 1636) | DAG | | | | |
| WAN013HVJ_at | HCD | Rn.75246 | Similar to RIKEN cDNA | #N/A | 7E−78 |
| (SEQ ID NO: 1638) | DAG | | 2310045A20 | | |
| WAN013HZK_at | HCD | NA | Cluster includes WAN008DS2 | #N/A | |
| (SEQ ID NO: 1643) | DAG | | 11228C-H04 | | |
| WAN013HZP_at | HCD | Eif4g2 | Eukaryotic translation initiation | Hs.183684 | 1E−179 |
| (SEQ ID NO: 1644) | DAG | | factor 4, gamma 2 | | |
| WAN013I01_at | HCD | MCFD2 | Multiple coagulation factor | Hs.293689 | 4E−59 |
| (SEQ ID NO: 1645) | DAG | | deficiency 2 | | |
| WAN013I15_at | HCD | SUCLG2 | Succinate-CoA ligase, GDP- | Hs.186512 | 1E−157 |
| (SEQ ID NO: 1647) | DAG | | forming, beta subunit | | |
| WAN013I2F_at | HCD | THBD | Thrombomodulin | Hs.2030 | 1E−18 |
| (SEQ ID NO: 1649) | DAG | | | | |
| WAN013I2K_at | HCD | TMEFF1 | Transmembrane protein with | Hs.336224 | 8E−93 |
| (SEQ ID NO: 1650) | DAG | | EGF-like and two follistatin-like | | |
| | | | domains 1 | | |
| WAN013I6C_at | HCD | SLC16A1 | Solute carrier family 16 | Hs.75231 | 2E−26 |
| (SEQ ID NO: 1655) | DAG | | (monocarboxylic acid | | |
| | | | transporters), member 1 | | |
| WAN013I6E_x_at | HCD | GSTP1 | Glutathione S-transferase pi | Hs.523836 | 1E−129 |
| (SEQ ID NO: 1656) | DAG | | | | |
| WAN013I8B_at | HCD | Akr1a4 | Aldo-keto reductase family 1, | Hs.474584 | 0 |
| (SEQ ID NO: 1659) | DAG | | member A4 (aldehyde | | |
| | | | reductase) | | |
| WAN013I8V_at | HCD | NCL | Nucleolin | Hs.79110 | 1E−111 |
| (SEQ ID NO: 1660) | DAG | | | | |
| WAN013I9G_at | HCD | SLC3A2 | Solute carrier family 3 (activators | Hs.502769 | 1E−105 |
| (SEQ ID NO: 1663) | DAG | | of dibasic and neutral amino acid | | |
| | | | transport), member 2 | | |
| WAN0088PR_at | HCD | CCPG1 | Cell cycle progression 1 | Hs.612814 | 2E−08 |
| (SEQ ID NO: 1589) | DCU | | | | |
| WAN0088Q6_at | HCD | Hist1h2bn | Histone 1, H2bn | Hs.534368 | 1E−153 |
| (SEQ ID NO: 1590) | DCU | | | | |
| WAN0088S8_at | HCD | SLC29A1 | Solute carrier family 29 | Hs.25450 | 3E−35 |
| (SEQ ID NO: 1591) | DCU | | (nucleoside transporters), | | |
| | | | member 1 | | |
| WAN0088T2_at | HCD | ATF4 | Activating transcription factor 4 | Hs.496487 | 1E−158 |
| (SEQ ID NO: 1592) | DCU | | (tax-responsive enhancer | | |
| | | | element B67) | | |
| WAN008CM7_x_at | HCD | MRPL51 | Mitochondrial ribosomal protein | Hs.55847 | 0.0002 |
| (SEQ ID NO: 1597) | DCU | | L51 | | |
| WAN008DGZ_at | HCD | SLC7A6OS | Solute carrier family 7, member | Hs.334848 | 2E−79 |
| (SEQ ID NO: 1606) | DCU | | 6 opposite strand | | |
| WAN008DJ8_f_at | HCD | Ubc | Ubiquitin C, mRNA (cDNA clone | Hs.378821 | 1E−22 |
| (SEQ ID NO: 1609) | DCU | | IMAGE: 2645223) | | |
| WAN008DQE_at | HCD | YES1 | V-yes-1 Yamaguchi sarcoma | Hs.194148 | 0 |
| (SEQ ID NO: 1612) | DCU | | viral oncogene homolog 1 | | |
| WAN008E2Q_at | HCD | GSPT1 | G1 to S phase transition 1 | Hs.528780 | 0 |
| (SEQ ID NO: 1618) | DCU | | | | |
| WAN008EJY_at | HCD | NA | WAN008EJY 11232A-H04 | #N/A | |
| (SEQ ID NO: 1624) | DCU | | | | |
| WAN008ERB_at | HCD | PCBP1 | Poly(rC) binding protein 1 | Hs.2853 | 0 |
| (SEQ ID NO: 1631) | DCU | | | | |
| WAN013HVL_at | HCD | UGDH | UDP-glucose dehydrogenase | Hs.28309 | 1E−160 |
| (SEQ ID NO: 1639) | DCU | | | | |
| WAN013HZ3_at | HCD | ARMCX3 | Armadillo repeat containing, X- | Hs.172788 | 4E−09 |
| (SEQ ID NO: 1642) | DCU | | linked 3 | | |
| WAN013I2L_at | HCD | SLC7A5 | solute carrier family 7 (cationic | Hs.513797 | 9.00E−07 |
| (SEQ ID NO: 1651) | DCU | | amino acid transporter, y+ | | |
| | | | system), member 5 | | |
| WAN013I3P_at | HCD | CAMLG | Calcium modulating ligand | Hs.529846 | 1E−147 |
| (SEQ ID NO: 1653) | DCU | | | | |
| WAN013I61_at | HCD | Nppb | Natriuretic peptide precursor | Hs.219140 | |
| (SEQ ID NO: 1654) | DCU | | type B | | |
| WAN013I6P_x_at | HCD | ABCB1 | ATP-binding cassette, sub-family | Hs.489033 | 0 |
| (SEQ ID NO: 1658) | DCU | | B (MDR/TAP), member 1 | | |
| Y00365_at | HCD | HMGB1 | High-mobility group box 1 | Hs.434102 | 1E−102 |
| (SEQ ID NO: 1674) | DCU | | | | |
| AF081143_at | HCGR | RPS18 | Ribosomal protein S18 | Hs.546290 | 1E−78 |
| (SEQ ID NO: 1585) | DAG | | | | |
| WAN0088PT_at | HCGR | Psmc1 | Protease (prosome, macropain) | Hs.356654 | 0 |
| (SEQ ID NO: 1556) | DAG | | 26S subunit, ATPase 1 | | |
| WAN0088XH_at | HCGR | HERPUD1 | Homocysteine-inducible, | Hs.146393 | 7E−79 |
| (SEQ ID NO: 1557) | DAG | | endoplasmic reticulum stress- | | |
| | | | inducible, ubiquitin-like domain | | |
| | | | member 1 | | |
| WAN008CM1_x_at | HCGR | NA | WAN008CM1 106000-F11 | WAN008CM1_x_at | #N/A |
| (SEQ ID NO: 1559) | DAG | | | Blast Report | |
| WAN008D6J_at | HCGR | HMGA2 | High mobility group AT-hook 2 | Hs.505924 | 4E−62 |
| (SEQ ID NO: 1563) | DAG | | | | |
| WAN008DSE_at | HCGR | SLC1A4 | Solute carrier family 1 | Hs.323878 | 2E−82 |
| (SEQ ID NO: 1566) | DAG | | (glutamate/neutral amino acid | | |
| | | | transporter), member 4 | | |
| WAN008EBJ_at | HCGR | Triobp | TRIO and F-actin binding protein | Hs.533030 | 6E−89 |
| (SEQ ID NO: 1569) | DAG | | | | |
| WAN008EFS_at | HCGR | TXNRD1 | Thioredoxin reductase 1 | Hs.567352 | 6E−18 |
| (SEQ ID NO: 1570) | DAG | | | | |
| WAN008EGV_at | HCGR | GDI2 | GDP dissociation inhibitor 2 | Hs.299055 | 0 |
| (SEQ ID NO: 1571) | DAG | | | | |
| WAN008EMQ_at | HCGR | KPNA3 | Karyopherin alpha 3 (importin | Hs.527919 | 1E−144 |
| (SEQ ID NO: 1572) | DAG | | alpha 4) | | |
| WAN008ERL_at | HCGR | ETFA | Electron transferring | Hs.39925 | 1E−135 |
| (SEQ ID NO: 1573) | DAG | | flavoprotein, alpha polypeptide | | |
| | | | (Etfa), nuclear gene encoding | | |
| | | | mitochondrial protein, mRNA | | |
| WAN008ETP_at | HCGR | AADACL1 | Arylacetamide deacetylase-like 1 | Hs.444099 | 2E−72 |
| (SEQ ID NO: 1574) | DAG | | | | |
| WAN008EX2_x_at | HCGR | IFRD1 | Interferon-related developmental | Hs.7879 | 7E−39 |
| (SEQ ID NO: 1575) | DAG | | regulator 1 | | |
| WAN013HUM_at | HCGR | EHD4 | EH-domain containing 4 | Hs.143703 | 1E−95 |
| (SEQ ID NO: 1576) | DAG | | | | |
| WAN013HWG_at | HCGR | NA | Cluster includes WAN008CSP | WAN013HWG_at | #N/A |
| (SEQ ID NO: 1577) | DAG | | 10602B-D10 | Blast Report | |
| WAN013HYO_at | HCGR | RPL11 | Ribosomal protein L11 | Hs.388664 | 0 |
| (SEQ ID NO: 1579) | DAG | | | | |
| WAN013I38_at | HCGR | Pkm2 | Pyruvate kinase, muscle, mRNA | Hs.198281 | 3E−63 |
| (SEQ ID NO: 1583) | DAG | | (cDNA clone MGC: 11908 | | |
| | | | IMAGE: 3598842) | | |
| WAN008CWC_x_at | HCGR | NA | WAN008CWC 10603C-F10 | #N/A | |
| (SEQ ID NO: 1560) | DCU | | | | |
| WAN008E8M_at | HCGR | HADHB | Hydroxyacyl-Coenzyme A | Hs.515848 | 1E−114 |
| (SEQ ID NO: 1568) | DCU | | dehydrogenase/3-ketoacyl- | | |
| | | | Coenzyme A thiolase/enoyl- | | |
| | | | Coenzyme A hydratase | | |
| | | | (trifunctional protein), beta | | |
| | | | subunit | | |
| U48852_at | HMQP | CRELD2 | Cysteine-rich with EGF-like | Hs.211282 | 1E−109 |
| (SEQ ID NO: 1502) | DAG | | domains 2 | | |
| WAN013HX9_at | HMQP | Cnbp1 | Cellular nucleic acid binding | Hs.518249 | 0 |
| (SEQ ID NO: 2066) | DAG | | protein 1 (Cnbp1), mRNA | | |
| WAN013HZ1_at | HMQP | MRLC2 | Myosin regulatory light chain | Hs.464472 | 1E−161 |
| (SEQ ID NO: 2067) | DAG | | MRLC2 | | |
| WAN013166_f_at | HMQP | Vim | Vimentin (Vim), mRNA | Hs.533317 | 1E−126 |
| (SEQ ID NO: 1494) | DAG | | | | |
| WAN013IAB_x_at | HMQP | TP53 | Tumor protein p53 (Li-Fraumeni | Hs.408312 | 1E−150 |
| (SEQ ID NO: 1496) | DAG | | syndrome) | | |
| WAN0088OD_at | HMQP | Pnrc1 | Proline-rich nuclear receptor | Hs.75969 | |
| (SEQ ID NO: 2068) | DCU | | coactivator 1 | | |
| WAN0088OT_at | HMQP | NA | WAN0088OT 10595D-F11 | #N/A | |
| (SEQ ID NO: 1479) | DCU | | | | |
| WAN0088U4_at | HMQP | C21orf66 | Chromosome 21 open reading | Hs.473635 | |
| (SEQ ID NO: 2069) | DCU | | frame 66 | | |
| WAN008DRM_at | HMQP | EPHX1 | Hypothetical gene supported by | Hs.89649 | |
| (SEQ ID NO: 1503) | DCU | | AK124699 | | |
| WAN008EEK_at | HMQP | NA | WAN008EEK 11231A-B10 | #N/A | |
| (SEQ ID NO: 2070) | DCU | | | | |
| WAN008F2S_at | HMQP | NA | WAN008F2S 11165A-F02 | #N/A | |
| SEQ ID NO: 1489 | DCU | | | | |
| AF115410_s_at | LAP DAG | DPM2 | Dolichyl-phosphate | Hs.108973 | 1E−38 |
| (SEQ ID NO: 2071) | Post TS | | mannosyltransferase polypeptide | | |
| | | | 2, regulatory subunit | | |
| AF157566_at | LAP DAG | GNAT1 | Guanine nucleotide binding | Hs.517978 | 1E−107 |
| (SEQ ID NO: 2072) | Post TS | | protein (G protein), alpha | | |
| | | | transducing activity polypeptide 1 | | |
| WAN0088SH_at | LAP DAG | GPR177 | G protein-coupled receptor 177 | Hs.22137 | 1E−172 |
| (SEQ ID NO: 2073) | Post TS | | | | |
| WAN0088Y2_at | LAP DAG | Ggnbp2 | Gametogenetin binding protein 2 | #N/A | 0 |
| (SEQ ID NO: 1882) | Post TS | | | | |
| WAN0088ZI_at | LAP DAG | PPP2R2A | Protein phosphatase 2 (formerly | Hs.146339 | 0 |
| (SEQ ID NO: 2074) | Post TS | | 2A), regulatory subunit B (PR | | |
| | | | 52), alpha isoform | | |
| WAN0088ZJ_at | LAP DAG | Slc4a2 | Solute carrier family 4 (anion | #N/A | 1E−162 |
| (SEQ ID NO: 2075) | Post TS | | exchanger), member 2 | | |
| WAN00896L_f_at | LAP DAG | NA | WAN00896L 10599C-A02 | #N/A | 0 |
| (SEQ ID NO: 2076) | Post TS | | | | |
| WAN008BNG_at | LAP DAG | LRRC28 | Leucine rich repeat containing | Hs.578684 | 4E−90 |
| (SEQ ID NO: 1780) | Post TS | | 28 | | |
| WAN008CI5_at | LAP DAG | CDC20 | CDC20 cell division cycle 20 | Hs.524947 | 1E−105 |
| (SEQ ID NO: 1839) | Post TS | | homolog (S. cerevisiae) | | |
| WAN008CRQ_at | LAP DAG | NA | WAN008CRQ 10602B-H08 | #N/A | 0 |
| (SEQ ID NO: 2077) | Post TS | | | | |
| WAN008CRX_at | LAP DAG | SNX13 | Sorting nexin 13 | Hs.585343 | 1E−175 |
| (SEQ ID NO: 2078) | Post TS | | | | |
| WAN008D4W_at | LAP DAG | PPT2 | Palmitoyl-protein thioesterase 2 | Hs.332138 | 6E−82 |
| (SEQ ID NO: 2079) | Post TS | | | | |
| WAN008DGZ_at | LAP DAG | NA | WAN008DGZ 11188B-H07 | #N/A | 2E−79 |
| (SEQ ID NO: 1606) | Post TS | | | | |
| WAN008DJI_at | LAP DAG | DARS | Aspartyl-tRNA synthetase | Hs.503787 | 2E−82 |
| (SEQ ID NO: 2080) | Post TS | | | | |
| WAN008DKS_at | LAP DAG | MAPK8IP1 | Mitogen-activated protein kinase | Hs.234249 | 1E−116 |
| (SEQ ID NO: 1787) | Post TS | | 8 interacting protein 1 | | |
| WAN008DL6_at | LAP DAG | Rn.6896 | Transcribed locus, strongly | #N/A | 1E−86 |
| (SEQ ID NO: 2081) | Post TS | | similar to XP_219519.2 | | |
| | | | PREDICTED: similar to C184L | | |
| | | | ORF1 protein [Rattus | | |
| | | | norvegicus] | | |
| WAN008DWE_at | LAP DAG | Nxf1 | Nuclear RNA export factor 1 | #N/A | 3E−15 |
| (SEQ ID NO: 2082) | Post TS | | homolog (S. cerevisiae) | | |
| WAN008E71_at | LAP DAG | ITCH | Itchy homolog E3 ubiquitin | Hs.632272 | 2E−97 |
| (SEQ ID NO: 2083) | Post TS | | protein ligase (mouse) | | |
| WAN008E8M_at | LAP DAG | HADHB | Hydroxyacyl-Coenzyme A | Hs.534639 | 1E−114 |
| (SEQ ID NO: 1568) | Post TS | | dehydrogenase/3-ketoacyl- | | |
| | | | Coenzyme A thiolase/enoyl- | | |
| | | | Coenzyme A hydratase | | |
| | | | (trifunctional protein), beta | | |
| | | | subunit | | |
| WAN008EDZ_at | LAP DAG | MSH6 | MutS homolog 6 (E. coli) | Hs.445052 | 1E−124 |
| (SEQ ID NO: 2084) | Post TS | | | | |
| WAN008EHM_at | LAP DAG | CLU | Clusterin | Hs.436657 | 1E−71 |
| (SEQ ID NO: 1709) | Post TS | | | | |
| WAN008EIX_at | LAP DAG | NA | WAN008EIX 11231D-C08 | #N/A | 0 |
| (SEQ ID NO: 2085) | Post TS | | | | |
| WAN008EP8_at | LAP DAG | TMEM39A | Transmembrane protein 39A | Hs.434927 | 4E−52 |
| (SEQ ID NO: 2086) | Post TS | | | | |
| WAN008EXG_at | LAP DAG | NUP98 | Nucleoporin 98 kDa | Hs.524750 | 1E−108 |
| (SEQ ID NO: 1901) | Post TS | | | | |
| WAN013HV6_x_at | LAP DAG | NA | Cluster includes WAN008F0U | #N/A | 3E−09 |
| (SEQ ID NO: 2087) | Post TS | | 10599A-F06 | | |
| WAN013HV8_x_at | LAP DAG | NA | Cluster includes WAN008F17 | #N/A | 2E−32 |
| (SEQ ID NO: 2088) | Post TS | | 10599A-G07 | | |
| WAN013HW2_at | LAP DAG | PSMC6 | Proteasome (prosome, | Hs.156171 | 0 |
| (SEQ ID NO: 2089) | Post TS | | macropain) 26S subunit, | | |
| | | | ATPase, 6 | | |
| WAN13HZ6_at | LAP DAG | BRD2 | Bromodomain containing 2 | Hs.75243 | 1E−122 |
| (SEQ ID NO: 2090) | Post TS | | | | |
| WAN013HZJ_at | LAP DAG | YY1 | YY1 transcription factor | Hs.388927 | 0 |
| (SEQ ID NO: 2091) | Post TS | | | | |
| WAN013I0C_at | LAP DAG | Cacybp | Calcyclin binding protein | Hs.447653 | 1E−153 |
| (SEQ ID NO: 2092) | Post TS | | | | |
| WAN013I3P_at | LAP DAG | CAMLG | Calcium modulating ligand | Hs.529846 | 1E−147 |
| (SEQ ID NO: 1653) | Post TS | | | | |
| WAN013I43_at | LAP DAG | FAU | Finkel-Biskis-Reilly murine | Hs.387208 | 1E−119 |
| (SEQ ID NO: 2093) | Post TS | | sarcoma virus (FBR-MuSV) | | |
| | | | ubiquitously expressed (fox | | |
| | | | derived); ribosomal protein S30 | | |
| WAN013I8C_at | LAP DAG | B3GAT3 | Beta-1,3-glucuronyltransferase 3 | Hs.449191 | 1E−159 |
| (SEQ ID NO: 2094) | Post TS | | (glucuronosyltransferase 1) | | |
| WAN008DT7_at | LAP DAG | GSTO1 | Glutathione S-transferase | Hs.190028 | 5E−65 |
| (SEQ ID NO: 1486) | PreTS | | omega 1 | | |
| WAN008EKU_at | LAP DAG | TAX1BP1 | Tax1 (human T-cell leukemia | Hs.34576 | 1E−120 |
| (SEQ ID NO: 1741) | PreTS | | virus type I) binding protein 1 | | |
| WAN013I4A_at | LAP DAG | CBR3 | Carbonyl reductase 3 | Hs.154510 | 0 |
| (SEQ ID NO: 2095) | PreTS | | | | |
| AF242536_at | LAP DCU | CSNK1E | Casein kinase 1, epsilon | Hs.474833 | 0 |
| (SEQ ID NO: 2096) | Post TS | | | | |
| AJ223076_at | LAP DCU | NA | AJ223076 Cricetulus griseus | #N/A | 9E−10 |
| (SEQ ID NO: 2097) | Post TS | | mRNA for TRIP protein | | |
| WAN008CTZ_at | LAP DCU | PGD | Phosphogluconate | Hs.464071 | 1E−105 |
| (SEQ ID NO: 2098) | Post TS | | dehydrogenase | | |
| WAN008D16_at | LAP DCU | PIAS1 | Protein inhibitor of activated | Hs.162458 | 1E−128 |
| (SEQ ID NO: 2099) | Post TS | | STAT, 1 | | |
| WAN008DCP_at | LAP DCU | TBC1D10A | TBC1 domain family, member | Hs.444950 | 0 |
| (SEQ ID NO: 2100) | Post TS | | 10A | | |
| WAN008DIE_at | LAP DCU | RAI14 | Retinoic acid induced 14 | Hs.431400 | 6E−95 |
| (SEQ ID NO: 2101) | Post TS | | | | |
| WAN008DKD_at | LAP DCU | MAFG | V-maf musculoaponeurotic | Hs.252229 | 1E−139 |
| (SEQ ID NO: 2102) | Post TS | | fibrosarcoma oncogene homolog | | |
| | | | G (avian) | | |
| WAN008DMP_at | LAP DCU | EWSR1 | Ewing sarcoma breakpoint | Hs.374477 | 1E−157 |
| (SEQ ID NO: 1968) | Post TS | | region 1 | | |
| WAN008DOG_at | LAP DCU | NA | WAN008DOG 11228A-E07 | #N/A | 0 |
| (SEQ ID NO: 2103) | Post TS | | | | |
| WAN008E2D_at | LAP DCU | WNK4 | WNK lysine deficient protein | Hs.105448 | 1E−31 |
| (SEQ ID NO: 2104) | Post TS | | kinase 4 | | |
| WAN008ECD_at | LAP DCU | NARG1 | NMDA receptor regulated 1 | Hs.555985 | 0 |
| (SEQ ID NO: 1898) | Post TS | | | | |
| WAN008EGD_at | LAP DCU | NA | WAN008EGD 11231B-D08 | #N/A | 0 |
| (SEQ ID NO: 2105) | Post TS | | | | |
| WAN008ERJ_x_at | LAP DCU | NA | WAN008ERJ 11232D-A07 | #N/A | 0 |
| (SEQ ID NO: 2106) | Post TS | | | | |
| WAN008ET2_at | LAP DCU | GSS | Glutathione synthetase | Hs.82327 | 5E−77 |
| (SEQ ID NO: 2107) | Post TS | | | | |
| WAN008EVI-rc_at | LAP DCU | Pparbp | Peroxisome proliferator activated | Hs.643754 | 5E−35 |
| (SEQ ID NO: 1902) | Post TS | | receptor binding protein | | |
| WAN008F32_at | LAP DCU | NA | WAN008F32 11165A-G04 | #N/A | 0 |
| (SEQ ID NO: 2108) | Post TS | | | | |
| WAN013HVM_at | LAP DCU | NA | Cluster includes WAN008CJJ | #N/A | 0 |
| (SEQ ID NO: 2109) | Post TS | | 10600B-H12 | | |
| WAN013HVV_at | LAP DCU | GHITM | Growth hormone inducible | Hs.352656 | 1E−148 |
| (SEQ ID NO: 2110) | Post TS | | transmembrane protein | | |
| WAN013HWQ_x_at | LAP DCU | Snx25 | Sorting nexin 25 | Hs.369091 | 1E−28 |
| (SEQ ID NO: 2111) | Post TS | | | | |
| WAN013HY1_at | LAP DCU | ACAT1 | Acetyl-Coenzyme A | Hs.232375 | 1E−161 |
| (SEQ ID NO: 2112) | Post TS | | acetyltransferase 1 (acetoacetyl | | |
| | | | Coenzyme A thiolase) | | |
| WAN013I0A_x_at | LAP DCU | PRPF38B | PRP38 pre-mRNA processing | Hs.342307 | 4E−84 |
| (SEQ ID NO: 2113) | Post TS | | factor 38 (yeast) domain | | |
| | | | containing B | | |
| WAN013I26_at | LAP DCU | IDH3A | Isocitrate dehydrogenase 3 | Hs.591110 | 0 |
| (SEQ ID NO: 2114) | Post TS | | (NAD+) alpha | | |
| WAN013I30_at | LAP DCU | HSP90B1 | Heat shock protein 90 kDa beta | Hs.192374 | 0 |
| (SEQ ID NO: 1528) | Post TS | | (Grp94), member 1 | | |
| WAN013I3A_at | LAP DCU | NA | Cluster includes WAN008C6M | #N/A | 2E−79 |
| (SEQ ID NO: 2115) | Post TS | | 10596B-B05 | | |
| WAN013I8P_at | LAP DCU | LAMP2 | Lysosomal-associated | Hs.496684 | 1E−133 |
| (SEQ ID NO: 1728) | Post TS | | membrane protein 2 | | |
| X53077_x_at | LAP DCU | NA | X53077 C. longicaudatus HPRT | #N/A | 0 |
| (SEQ ID NO: 2116) | Post TS | | gene, exon 5 | | |
| AF121895_at | LAP DCU | NA | AF121895 Cricetulus griseus | #N/A | 0 |
| (SEQ ID NO: 2117) | PreTS | | dolichol-phosphate-mannose | | |
| | | | synthase (DPM1) mRNA, | | |
| | | | complete cds. | | |
| WAN008BNY_at | LAP DCU | NSMCE1 | Non-SMC element 1 homolog | Hs.284295 | 1E−129 |
| (SEQ ID NO: 1791) | PreTS | | (S. cerevisiae) | | |
| WAN008CNN_at | LAP DCU | NUDT9 | Nudix (nucleoside diphosphate | Hs.149500 | 1E−147 |
| (SEQ ID NO: 2118) | PreTS | | linked moiety X)-type motif 9 | | |
| WAN008EOG_at | LAP DCU | NA | WAN008EOG 11232C-D07 | #N/A | 0 |
| (SEQ ID NO: 2119) | PreTS | | | | |
| WAN013HYK_at | LAP DCU | EPS8 | Epidermal growth factor receptor | Hs.591160 | 2E−15 |
| (SEQ ID NO: 1716) | PreTS | | pathway substrate 8 | | |
| Y12837_at | LAP DCU | Fxr1h | Fragile X mental retardation | #N/A | 0 |
| (SEQ ID NO: 2120) | PreTS | | gene 1, autosomal homolog | | |
| AF004831_at | LLP DAG | SPTLC1 | Serine palmitoyltransferase, long | Hs.90458 | 1E−18 |
| (SEQ ID NO: 1536) | | | chain base subunit 1 | | |
| AF072727_at | LLP DAG | JTV1 | JTV1 gene | Hs.301613 | 8E−79 |
| (SEQ ID NO: 2121) | | | | | |
| AF081142_at | LLP DAG | UBA52 | Ubiquitin A-52 residue ribosomal | Hs.5308 | 8E−75 |
| (SEQ ID NO: 2122) | | | protein fusion product 1 | | |
| D86467_at | LLP DAG | TM4SF1 | Transmembrane 4 L six family | Hs.351316 | 2E−41 |
| (SEQ ID NO: 2123) | | | member 1 | | |
| M12329_g_at | LLP DAG | Mm.392113 | Transcribed locus, moderately | #N/A | 1E−132 |
| (SEQ ID NO: 1942) | | | similar to XP_426592.1 | | |
| | | | PREDICTED: similar to tubulin, | | |
| | | | alpha 2; tubulin alpha 2 [Gallus | | |
| | | | gallus] | | |
| M22350_at | LLP DAG | ATP5I | ATP synthase, H+ transporting, | Hs.85539 | 1E−35 |
| (SEQ ID NO: 2124) | | | mitochondrial F0 complex, | | |
| | | | subunit E | | |
| U49841_at | LLP DAG | Gosr1 | Golgi SNAP receptor complex | Hs.645262 | 2E−17 |
| (SEQ ID NO: 2125) | | | member 1 | | |
| WAN0088K3_at | LLP DAG | NA | WAN0088K3 10595A-A03 | #N/A | 0 |
| (SEQ ID NO: 2126) | | | | | |
| WAN0088MM_at | LLP DAG | NA | WAN0088MM 10595C-G09 | #N/A | 0 |
| (SEQ ID NO: 2127) | | | | | |
| WAN0088PU_at | LLP DAG | Ywhab | Tyrosine 3- | Hs.645387 | 1E−102 |
| (SEQ ID NO: 2128) | | | monooxygenase/tryptophan 5- | | |
| | | | monooxygenase activation | | |
| | | | protein, beta polypeptide | | |
| WAN0088X9_at | LLP DAG | RAB34 | RAB34, member RAS oncogene | Hs.301853 | 1E−108 |
| (SEQ ID NO: 1553) | | | family | | |
| WAN0088Z7_at | LLP DAG | GPSN2 | Glycoprotein, synaptic 2 | Hs.515642 | 0 |
| (SEQ ID NO: 2129) | | | | | |
| WAN008900_at | LLP DAG | 2610301K12Rik | RIKEN cDNA 2610301K12 gene | #N/A | 0 |
| (SEQ ID NO: 2130) | | | | | |
| WAN008CN4_at | LLP DAG | NA | WAN008CN4 10600C-B03 | #N/A | 0 |
| (SEQ ID NO: 2131) | | | | | |
| WAN008CS2_at | LLP DAG | VKORC1L1 | Vitamin K epoxide reductase | Hs.427232 | 1E−168 |
| (SEQ ID NO: 1694) | | | complex, subunit 1-like 1 | | |
| WAN008CSN_at | LLP DAG | OACT5 | O-acyltransferase (membrane | #N/A | 1E−140 |
| (SEQ ID NO: 2132) | | | bound) domain containing 5 | | |
| WAN008D3X_at | LLP DAG | PPT1 | Palmitoyl-protein thioesterase 1 | Hs.3873 | 1E−101 |
| (SEQ ID NO: 2133) | | | (ceroid-lipofuscinosis, neuronal | | |
| | | | 1, infantile) | | |
| WAN008DBL_at | LLP DAG | NDUFB9 | NADH dehydrogenase | Hs.15977 | 1E−120 |
| (SEQ ID NO: 1730) | | | (ubiquinone) 1 beta subcomplex, | | |
| | | | 9, 22 kDa | | |
| WAN008DK1_at | LLP DAG | UQCRC1 | Ubiquinol-cytochrome c | Hs.119251 | 3E−69 |
| (SEQ ID NO: 1829) | | | reductase core protein I | | |
| WAN008DLQ_at | LLP DAG | ATP5O | ATP synthase, H+ transporting, | Hs.409140 | 4E−53 |
| (SEQ ID NO: 2134) | | | mitochondrial F1 complex, O | | |
| | | | subunit (oligomycin sensitivity | | |
| | | | conferring protein) | | |
| WAN008DNO_at | LLP DAG | ELP4 | Elongation protein 4 homolog (S. cerevisiae) | Hs.175534 | 1E−126 |
| (SEQ ID NO: 2135) | | | | | |
| WAN008DRQ_x_at | LLP DAG | Sdha | Succinate dehydrogenase | Hs.440475 | 3E−09 |
| (SEQ ID NO: 2136) | | | complex, subunit A, flavoprotein | | |
| | | | (Fp) | | |
| WAN008DXB_f_at | LLP DAG | NA | WAN008DXB 11229A-D08 | #N/A | 0 |
| (SEQ ID NO: 2137) | | | | | |
| WAN008E1P_at | LLP DAG | Nomo1 | Nodal modulator 1 | Hs.583391 | 6E−83 |
| (SEQ ID NO: 2138) | | | | | |
| WAN008E8D_at | LLP DAG | Ipo7 | Importin 7 | Hs.643522 | 1E−136 |
| (SEQ ID NO: 2139) | | | | | |
| WAN008EEE_at | LLP DAG | DDX3X | DEAD (Asp-Glu-Ala-Asp) box | Hs.380774 | 1E−138 |
| (SEQ ID NO: 2140) | | | polypeptide 3, X-linked | | |
| WAN008EH6_at | LLP DAG | STT3A | STT3, subunit of the | Hs.504237 | 0 |
| (SEQ ID NO: 2141) | | | oligosaccharyltransferase | | |
| | | | complex, homolog A (S. cerevisiae) | | |
| WAN008EHM_at | LLP DAG | CLU | Clusterin | Hs.436657 | 1E−71 |
| (SEQ ID NO: 1709) | | | | | |
| WAN008EK5- | LLP DAG | NA | RC WAN008EK5 11232A-G08 | #N/A | 3E−35 |
| rc_x_at | | | | | |
| (SEQ ID NO: 1979) | | | | | |
| WAN008EKV_at | LLP DAG | INSIG1 | Insulin induced gene 1 | Hs.520819 | 1E−83 |
| (SEQ ID NO: 2142) | | | | | |
| WAN008EN3_at | LLP DAG | Cldnd1 | Claudin domain containing 1 | Hs.531371 | 0 |
| (SEQ ID NO: 2142) | | | | | |
| WAN008EOR_x_at | LLP DAG | NA | WAN008EOR 11232C-C06 | #N/A | 0 |
| (SEQ ID NO: 2144) | | | | | |
| WAN008EPF_at | LLP DAG | TXNDC4 | Thioredoxin domain containing 4 | Hs.591899 | 1E−152 |
| (SEQ ID NO: 2145) | | | (endoplasmic reticulum) | | |
| WAN008EPP_at | LLP DAG | Rdh11 | Retinol dehydrogenase 11 | Hs.226007 | 0 |
| (SEQ ID NO: 2146) | | | | | |
| WAN008ERQ_at | LLP DAG | ACTR6 | ARP6 actin-related protein 6 | Hs.115088 | 2E−74 |
| (SEQ ID NO: 2147) | | | homolog (yeast) | | |
| WAN008ESB_at | LLP DAG | NA | WAN008ESB 11233A-F09 | #N/A | 1E−15 |
| (SEQ ID NO: 2148) | | | | | |
| WAN008ESS_at | LLP DAG | NA | WAN008ESS 11233A-D10 | #N/A | 0 |
| (SEQ ID NO: 2149) | | | | | |
| WAN008ET4_at | LLP DAG | ATP6V1E1 | ATPase, H+ transporting, | Hs.517338 | 1E−173 |
| (SEQ ID NO: 2150) | | | lysosomal 31 kDa, V1 subunit E1 | | |
| WAN008EWS_at | LLP DAG | PLAA | Phospholipase A2-activating | Hs.27182 | 0 |
| (SEQ ID NO: 1688) | | | protein | | |
| WAN008F30_f_at | LLP DAG | Mm.389704 | PREDICTED: Mus musculus | #N/A | 1E−26 |
| (SEQ ID NO: 2151) | | | similar to 40S ribosomal protein | | |
| | | | S2 (LOC623466), mRNA | | |
| WAN013HU8_at | LLP DAG | METAP1 | Methionyl aminopeptidase 1 | Hs.480364 | 1E−175 |
| (SEQ ID NO: 2152) | | | | | |
| WAN013HVQ_f_at | LLP DAG | H3F3B | H3 histone, family 3B (H3.3B) | Hs.180877 | 1E−130 |
| (SEQ ID NO: 2153) | | | | | |
| WAN013HW1_at | LLP DAG | Eef1d | Eukaryotic translation elongation | Hs.333388 | 1E−115 |
| (SEQ ID NO: 1989) | | | factor 1 delta (guanine | | |
| | | | nucleotide exchange protein) | | |
| WAN013HWP_x_at | LLP DAG | NA | Cluster includes WAN008CUN | #N/A | 0 |
| (SEQ ID NO: 1707) | | | 10602C-E01 | | |
| WAN013HX0_at | LLP DAG | NA | Cluster includes WAN008CXR | #N/A | 2E−07 |
| (SEQ ID NO: 2154) | | | 10603C-A08 | | |
| WAN013HX2_x_at | LLP DAG | NA | Cluster includes WAN008CWY | #N/A | 0 |
| (SEQ ID NO: 2155) | | | 10603C-D08 | | |
| WAN013HXU_at | LLP DAG | PSMA1 | Proteasome (prosome, | Hs.102798 | 0 |
| (SEQ ID NO: 2156) | | | macropain) subunit, alpha type, 1 | | |
| WAN013I3S_at | LLP DAG | Rpl19 | Ribosomal protein L19 | Hs.381061 | 0 |
| (SEQ ID NO: 2157) | | | | | |
| WAN013I40_at | LLP DAG | Mm.309697 | PREDICTED: Mus musculus | #N/A | 1E−139 |
| (SEQ ID NO: 2158) | | | similar to ribosomal protein S14, | | |
| | | | transcript variant 2 | | |
| | | | (LOC545121), mRNA | | |
| WAN013I98_at | LLP DAG | TST | Thiosulfate sulfurtransferase | Hs.474783 | 0 |
| (SEQ ID NO: 1818) | | | (rhodanese) | | |
| X98066_at | LLP DAG | TSN | Translin | Hs.75066 | 1E−87 |
| (SEQ ID NO: 2159) | | | | | |
| AF004814_at | LLP DCU | UBE2I | Ubiquitin-conjugating enzyme | Hs.302903 | 1E−157 |
| (SEQ ID NO: 2160) | | | E2I (UBC9 homolog, yeast) | | |
| WAN008939_at | LLP DCU | NA | WAN008939 10599B-G04 | #N/A | 5E−28 |
| (SEQ ID NO: 2161) | | | | | |
| WAN008DZC_x_at | LLP DCU | NA | WAN008DZC 11229B-E04 | #N/A | 0 |
| (SEQ ID NO: 2162) | | | | | |
| WAN013HVW_at | LLP DCU | Scd1 | Stearoyl-Coenzyme A | #N/A | 0 |
| (SEQ ID NO: 1926) | | | desaturase 1 | | |
| WAN013HWY_at | LLP DCU | CCDC80 | Coiled-coil domain containing 80 | Hs.477128 | 6E−92 |
| (SEQ ID NO: 1710) | | | | | |
| WAN013HZQ_at | LLP DCU | NA | Cluster includes WAN008DXN | #N/A | 0 |
| (SEQ ID NO: 2163) | | | 11229A-B12 | | |
| Y11149_at | LLP DCU | TEF | Thyrotrophic embryonic factor | Hs.181159 | 1E−147 |
| (SEQ ID NO: 2164) | | | | | |
| WAN0088J1_at | SHCV | Mrpl16 | Mitochondrial ribosomal protein | Hs.530734 | 1E−53 |
| (SEQ ID NO: 2165) | DAG | | L16 | | |
| WAN008BOI_at | SHCV | NA | WAN008BOI 11233D-B12 | #N/A | 0 |
| (SEQ ID NO: 2166) | DAG | | | | |
| WAN008BR0_at | SHCV | GOT2 | Glutamic-oxaloacetic | Hs.599470 | 0.000001 |
| (SEQ ID NO: 1773) | DAG | | transaminase 2, mitochondrial | | |
| | | | (aspartate aminotransferase 2) | | |
| WAN008BR4_at | SHCV | NA | WAN008BR4 11231C-G09 | #N/A | 3E−29 |
| (SEQ ID NO: 2167) | DAG | | | | |
| WAN008CLK_at | SHCV | RAB6A | RAB6A, member RAS oncogene | Hs.12152 | 2E−55 |
| (SEQ ID NO: 1552) | DAG | | family | | |
| WAN008CPX_at | SHCV | 2010003J03Rik | RIKEN cDNA 2010003J03 gene | #N/A | 1E−152 |
| (SEQ ID NO: 2168) | DAG | | | | |
| WAN008D2Y_at | SHCV | ZA20D2 | Zinc finger, A20 domain | #N/A | 0 |
| (SEQ ID NO: 2169) | DAG | | containing 2 | | |
| WAN008DTC_at | SHCV | 2700085E05Rik | RIKEN cDNA 2700085E05 gene | #N/A | 2E−99 |
| (SEQ ID NO: 2170) | DAG | | | | |
| WAN008ECX_at | SHCV | Cd151 | CD151 antigen | #N/A | 9E−85 |
| (SEQ ID NO: 1759) | DAG | | | | |
| WAN008EGM_at | SHCV | SPFH1 | SPFH domain family, member 1 | Hs.150087 | 7E−21 |
| (SEQ ID NO: 2171) | DAG | | | | |
| WAN008EHM_at | SHCV | CLU | Clusterin | Hs.436657 | 1E−71 |
| (SEQ ID NO: 1709) | DAG | | | | |
| WAN013HUO_at | SHCV | SUCLG1 | Succinate-CoA ligase, GDP- | Hs.270428 | 1E−148 |
| (SEQ ID NO: 2172) | DAG | | forming, alpha subunit | | |
| WAN013HY0_at | SHCV | PRPF19 | PRP19/PSO4 pre-mRNA | Hs.502705 | 0 |
| (SEQ ID NO: 2173) | DAG | | processing factor 19 homolog (S. cerevisiae) | | |
| WAN013I3P_at | SHCV | CAMLG | Calcium modulating ligand | Hs.529846 | 1E−147 |
| (SEQ ID NO: 1653) | DAG | | | | |
| WAN013I6C_at | SHCV | SLC16A1 | Solute carrier family 16 | Hs.75231 | 2E−26 |
| (SEQ ID NO: 1655) | DAG | | (monocarboxylic acid | | |
| | | | transporters), member 1 | | |
| WAN013I9G_at | SHCV | SLC3A2 | Solute carrier family 3 (activators | Hs.502769 | 1E−105 |
| (SEQ ID NO: 1663) | DAG | | of dibasic and neutral amino acid | | |
| | | | transport), member 2 | | |
| WAN013I9M_x_at | SHCV | TUBB2B | Tubulin, beta 2B | Hs.300701 | 0 |
| (SEQ ID NO: 2174) | DAG | | | | |
| WAN013I9N_at | SHCV | TUBB2C | Tubulin, beta 2C | Hs.433615 | 1E−154 |
| (SEQ ID NO: 2175) | DAG | | | | |
| M26640_at | SHCV | CLU | Clusterin | Hs.436657 | 7E−92 |
| (SEQ ID NO: 2054) | DCU | | | | |
| WAN0088OE_at | SHCV | Crk | V-crk sarcoma virus CT10 | Hs.638121 | 1E−161 |
| (SEQ ID NO: 2176) | DCU | | oncogene homolog (avian) | | |
| WAN0088S8_at | SHCV | SLC29A1 | Solute carrier family 29 | Hs.25450 | 3E−35 |
| (SEQ ID NO: 1591) | DCU | | (nucleoside transporters), | | |
| | | | member 1 | | |
| WAN008CRQ_at | SHCV | NA | WAN008CRQ 10602B-H08 | #N/A | 0 |
| (SEQ ID NO: 2077) | DCU | | | | |
| WAN008CSC_at | SHCV | GARS | Glycyl-tRNA synthetase | Hs.404321 | 1E−176 |
| (SEQ ID NO: 2177) | DCU | | | | |
| WAN008CTA_at | SHCV | NOLC1 | Nucleolar and coiled-body | Hs.523238 | 1E−101 |
| (SEQ ID NO: 1957) | DCU | | phosphoprotein 1 | | |
| WAN008CZB_at | SHCV | D10Wsu52e | DNA segment, Chr 10, Wayne | #N/A | 0 |
| (SEQ ID NO: 2178) | DCU | | State University 52, expressed | | |
| WAN008D0D_x_at | SHCV | Cflar | CASP8 and FADD-like apoptosis | Hs.390736 | 0 |
| (SEQ ID NO: 2179) | DCU | | regulator | | |
| WAN008D0K_at | SHCV | AA408296 | Expressed sequence AA408296 | #N/A | 1E−110 |
| (SEQ ID NO: 1877) | DCU | | | | |
| WAN008D6B_at | SHCV | NA | WAN008D6B 11164A-D04 | #N/A | 0 |
| (SEQ ID NO: 2180) | DCU | | | | |
| WAN008DMI_at | SHCV | ACSL5 | Acyl-CoA synthetase long-chain | Hs.11638 | 1E−118 |
| (SEQ ID NO: 1610) | DCU | | family member 5 | | |
| WAN008DQM_at | SHCV | XPNPEP1 | X-prolyl aminopeptidase | Hs.390623 | 1E−147 |
| (SEQ ID NO: 2181) | DCU | | (aminopeptidase P) 1, soluble | | |
| WAN008DTZ_at | SHCV | AMOTL2 | Angiomotin like 2 | Hs.426312 | 7E−76 |
| (SEQ ID NO: 2182) | DCU | | | | |
| WAN008E21_at | SHCV | MYC | V-myc myelocytomatosis viral | Hs.202453 | 3E−77 |
| (SEQ ID NO: 2183) | DCU | | oncogene homolog (avian) | | |
| WAN008E6J_x_at | SHCV | NA | WAN008E6J 11230B-F06 | #N/A | 0 |
| (SEQ ID NO: 2184) | DCU | | | | |
| WAN008EAJ_at | SHCV | Eif3s10 | Eukaryotic translation initiation | #N/A | 1E−129 |
| (SEQ ID NO: 2185) | DCU | | factor 3, subunit 10 (theta) | | |
| WAN008EAK_at | SHCV | ZDHHC6 | Zinc finger, DHHC-type | Hs.196990 | 1E−149 |
| (SEQ ID NO: 2186) | DCU | | containing 6 | | |
| WAN008EFI_at | SHCV | PRSS15 | Protease, serine, 15 | Hs.350265 | 1E−167 |
| (SEQ ID NO: 2187) | DCU | | | | |
| WAN008EQ0_at | SHCV | NA | WAN008EQ0 11232D-G01 | #N/A | 1E−107 |
| (SEQ ID NO: 2188) | DCU | | | | |
| WAN008EV8_at | SHCV | MTHFD2 | Methylenetetrahydrofolate | Hs.469030 | 7E−50 |
| (SEQ ID NO: 2189) | DCU | | dehydrogenase (NADP+ | | |
| | | | dependent) 2, | | |
| | | | methenyltetrahydrofolate | | |
| | | | cyclohydrolase | | |
| WAN008EYJ_at | SHCV | PHLDB1 | Pleckstrin homology-like domain, | Hs.504062 | 1E−122 |
| (SEQ ID NO: 2190) | DCU | | family B, member 1 | | |
| WAN008F02_at | SHCV | TFPI | Tissue factor pathway inhibitor | Hs.516578 | 3E−14 |
| (SEQ ID NO: 2191) | DCU | | (lipoprotein-associated | | |
| | | | coagulation inhibitor) | | |
| WAN008F1L_at | SHCV | Mxi1 | Max interacting protein 1 | Hs.501023 | 1E−127 |
| (SEQ ID NO: 1782) | DCU | | | | |
| WAN008F30_f_at | SHCV | Mm.389704 | PREDICTED: Mus musculus | #N/A | 1E−26 |
| (SEQ ID NO: 2151) | DCU | | similar to 40S ribosomal protein | | |
| | | | S2 (LOC623466), mRNA | | |
| WAN013HUC_at | SHCV | SOD1 | Superoxide dismutase 1, soluble | Hs.443914 | 2E−73 |
| (SEQ ID NO: 2192) | DCU | | (amyotrophic lateral sclerosis 1 | | |
| | | | (adult)) | | |
| WAN013HUX_at | SHCV | Cdv3 | Carnitine deficiency-associated | | 2E−39 |
| (SEQ ID NO: 2193) | DCU | | gene expressed in ventricle 3 | | |
| WAN013HZ9_at | SHCV | CSPG6 | Chondroitin sulfate proteoglycan | #N/A | 0 |
| (SEQ ID NO: 2194) | DCU | | 6 (bamacan) | | |
| WAN013I3K_at | SHCV | IDH1 | Isocitrate dehydrogenase 1 | Hs.11223 | 0 |
| (SEQ ID NO: 1723) | DCU | | (NADP+), soluble | | |
| WAN013I6G_at | SHCV | NA | Cluster includes M12252 | #N/A | 0 |
| (SEQ ID NO: 1999) | DCU | | Chinese hamster alpha-tubulin I | | |
| | | | mRNA, complete cds. | | |
| WAN013I8T_at | SHCV | Tuba2 | Tubulin, alpha 2 | #N/A | 0 |
| (SEQ ID NO: 1999) | DCU | | | | |
| WAN013I9K_at | SHCV | Gstm1 | Glutathione S-transferase, mu 1 | Hs.301961 | 1E−87 |
| (SEQ ID NO: 2195) | DCU | | | | |
| AF056934_at | SHQP | APEX1 | APEX nuclease (multifunctional | Hs.73722 | 1E−122 |
| (SEQ ID NO: 2196) | DAG | | DNA repair enzyme) 1 | | |
| S74024_at | SHQP | XPA | Xeroderma pigmentosum, | Hs.591907 | 4E−54 |
| (SEQ ID NO: 1832) | DAG | | complementation group A | | |
| WAN008CJT_at | SHQP | SSR2 | Signal sequence receptor, beta | Hs.74564 | 1E−132 |
| (SEQ ID NO: 2197) | DAG | | (translocon-associated protein | | |
| | | | beta) | | |
| WAN008D1G_at | SHQP | Cul4b | Cullin 4B | Hs.102914 | 1E−172 |
| (SEQ ID NO: 2198) | DAG | | | | |
| WAN008EFO_at | SHQP | TM9SF2 | Transmembrane 9 superfamily | Hs.130413 | 1E−153 |
| (SEQ ID NO: 1825) | DAG | | member 2 | | |
| WAN008EQU_at | SHQP | Eif4a1 | Eukaryotic translation initiation | Hs.129673 | 1E−126 |
| (SEQ ID NO: 2199) | DAG | | factor 4A1 | | |
| WAN008ERA_at | SHQP | NA | WAN008ERA 11232D-B06 | #N/A | 0 |
| (SEQ ID NO: 2200) | DAG | | | | |
| WAN013HUI_at | SHQP | HIP2 | Huntingtin interacting protein 2 | Hs.50308 | 0 |
| (SEQ ID NO: 2045) | DAG | | | | |
| WAN013I9V_at | SHQP | Pgk1 | Phosphoglycerate kinase 1 | Hs.78771 | 0 |
| (SEQ ID NO: 2201) | DAG | | | | |
| WAN013IA0_at | SHQP | NA | Cluster includes J00060 Chinese | #N/A | 0 |
| (SEQ ID NO: 1495) | DAG | | hamster hprt mRNA, complete | | |
| | | | cds. | | |
| AF371373_at | SHQP | NA | AF371373 Cricetulus griseus | #N/A | 1E−113 |
| (SEQ ID NO: 2202) | DCU | | hypothetical protein A1-3 mRNA, | | |
| | | | complete cds. | | |
| WAN008CY8_at | SHQP | PRDM5 | PR domain containing 5 | Hs.132593 | 2E−42 |
| (SEQ ID NO: 2203) | DCU | | | | |
| WAN008DP1_x_at | SHQP | NA | WAN008DP1 11228A-B07 | #N/A | 0 |
| (SEQ ID NO: 2204) | DCU | | | | |
| WAN008DRO_at | SHQP | NA | WAN008DRO 11228B-A06 | #N/A | 0 |
| (SEQ ID NO: 2205) | DCU | | | | |
| WAN008EGO_f_at | SHQP | NA | WAN008EGO 11231B-C08 | #N/A | 0 |
| (SEQ ID NO: 2206) | DCU | | | | |
| WAN008EME_at | SHQP | NA | WAN008EME 11232B-F08 | #N/A | 0 |
| (SEQ ID NO: 2207) | DCU | | | | |
| WAN013I8N_at | SHQP | IMPDH2 | IMP (inosine monophosphate) | Hs.476231 | 0 |
| (SEQ ID NO: 1776) | DCU | | dehydrogenase 2 | | |
| Y12074_at | SHQP | SLC35A1 | Solute carrier family 35 (CMP- | Hs.423163 | 1E−171 |
| (SEQ ID NO: 2208) | DCU | | sialic acid transporter), member | | |
| | | | A1 | | |

| | | | Mouse | | | | | |
|---|---|---|---|---|---|---|---|---|
| Qualifier List | % ID | % QC | Unigene ID | eValue | % ID | % QC | FC | Function |
| AB020230_at | 91.66667 | 7.5 | #N/A | 2E−17 | 92.537313 | 10.46875 | down | |
| (SEQ ID NO: 1665) | | | | | | | | |
| AF113614_at | 86.26506 | 80.89669 | Mm.87596 | 1E−167 | 92.325581 | 83.82066 | down | |
| (SEQ ID NO: 1668) | | | | | | | | |
| AF320819_at | 90.09901 | 17.11864 | Mm.726 | 4E−92 | 89.144737 | 51.52542 | down | |
| (SEQ ID NO: 1669) | | | | | | | | |
| M76730_at | 91.35802 | 30.97514 | Mm.7281 | 1E−110 | 96.442688 | 48.37476 | down | |
| (SEQ ID NO: 1671) | | | | | | | | |
| U62588_x_at | 93 | 53.19149 | Mm.2580 | 7E−48 | 90.849673 | 81.38298 | down | |
| (SEQ ID NO: 1586) | | | | | | | | |
| WAN0088J9_x_at | 87.6494 | 20.29103 | Mm.4189 | 4.00E−60 | 89.423077 | 16.81487 | 1.78 | |
| (SEQ ID NO: 1588) | | | | | | | | |
| WAN008BRK_at | 93.61702 | 71.75573 | Mm.142729 | 0 | 95.339806 | 98.28244 | down | |
| (SEQ ID NO: 1594) | | | | | | | | |
| WAN008BSG_x_at | 89.92248 | 36.23596 | Mm.28765 | 5E−44 | 91.78744 | 58.14607 | up | |
| (SEQ ID NO: 1595) | | | | | | | | |
| WAN008CHP_x_at | | | #N/A | | | | up | |
| (SEQ ID NO: 1596) | | | | | | | | |
| WAN008D3Z_at | 88.8668 | 100 | Mm.62886 | 1E−150 | 90.854871 | 100 | down | |
| (SEQ ID NO: 1602) | | | | | | | | |
| WAN008DFT_at | 83.21678 | 26.33517 | Mm.181473 | 9E−53 | 87.124464 | 42.90976 | 1.78 | |
| (SEQ ID NO: 1605) | | | | | | | | |
| WAN008DI7_at | | | Mm.28865 | 2E−23 | 86.956522 | 68.45238 | down | |
| (SEQ ID NO: 1607) | | | | | | | | |
| WAN008DIA_at | 90.55441 | 97.4 | Mm.311063 | 0 | 95.4 | 100 | up | |
| (SEQ ID NO: 1608) | | | | | | | | |
| WAN008DMJ_at | 89.57169 | 100 | Mm.336898 | 0 | 92.682927 | 99.25512 | up | |
| (SEQ ID NO: 1611) | | | | | | | | |
| WAN008DS9_at | 89.01869 | 90.87049 | Mm.276826 | 1E−132 | 92.982456 | 84.71338 | up | |
| (SEQ ID NO: 1613) | | | | | | | | |
| WAN008E06_at | 85.47215 | 76.34011 | Mm.35467 | 0 | 91.369606 | 98.52126 | down | |
| (SEQ ID NO: 1616) | | | | | | | | |
| WAN008EKK_at | 91.66667 | 98.63014 | Mm.87277 | 2E−89 | 90.181818 | 94.17808 | −1.58 | |
| (SEQ ID NO: 1625) | | | | | | | | |
| WAN008END_at | 83.33333 | 74.84407 | Mm.276063 | 0 | 92.291667 | 99.7921 | | |
| (SEQ ID NO: 1628) | | | | | | | | |
| WAN008EQM_at | | | #N/A | | | | −2.21 | |
| (SEQ ID NO: 1630) | | | | | | | | |
| WAN008ERO_at | 89.11565 | 28.21497 | Mm.33721 | 3E−40 | 90.510949 | 26.29559 | up | |
| (SEQ ID NO: 1633) | | | | | | | | |
| WAN008EY0_at | 90.21113 | 99.04943 | Mm.58660 | 1E−163 | 88.78327 | 100 | up | |
| (SEQ ID NO: 1636) | | | | | | | | |
| WAN013HVJ_at | 83.66834 | 71.58273 | #N/A | 1E−118 | 87.112172 | 75.35971 | down | |
| (SEQ ID NO: 1638) | | | | | | | | |
| WAN013HZK_at | | | #N/A | 7E−10 | 88.372093 | 17.58691 | 4 | |
| (SEQ ID NO: 1643) | | | | | | | | |
| WAN013HZP_at | 97.74648 | 72.44898 | Mm.185453 | 0 | 99.71831 | 72.44898 | 1.2 | |
| (SEQ ID NO: 1644) | | | | | | | | |
| WAN013I01_at | 89.56044 | 52 | Mm.30251 | 2E−35 | 84.699454 | 52.28571 | down | |
| (SEQ ID NO: 1645) | | | | | | | | |
| WAN013I15_at | 85.81952 | 100 | Mm.292637 | 0 | 88.39779 | 100 | 1.55 | |
| (SEQ ID NO: 1647) | | | | | | | | |
| WAN013I2F_at | 88.76404 | 18.05274 | Mm.24096 | 9E−93 | 85.714286 | 92.29209 | up | |
| (SEQ ID NO: 1649) | | | | | | | | |
| WAN013I2K_at | 91.07807 | 100 | Mm.130982 | 7E−86 | 89.962825 | 100 | down | |
| (SEQ ID NO: 1650) | | | | | | | | |
| WAN013I6C_at | 84.47205 | 12.69716 | Mm.9086 | 1E−110 | 87.239583 | 30.28391 | up | |
| (SEQ ID NO: 1655) | | | | | | | | |
| WAN013I6E_x_at | 81.99052 | 85.88874 | #N/A | 0 | 87.576687 | 88.46676 | down | |
| (SEQ ID NO: 1656) | | | | | | | | |
| WAN013I8B_at | 91.53713 | 99.31389 | Mm.30085 | 0 | 91.709845 | 99.31389 | down | |
| (SEQ ID NO: 1659) | | | | | | | | |
| WAN013I8V_at | 90.05848 | 67.05882 | Mm.154378 | 1E−137 | 93.274854 | 67.05882 | up | |
| (SEQ ID NO: 1660) | | | | | | | | |
| WAN013I9G_at | 84.85437 | 38.06356 | Mm.4114 | 0 | 88.596491 | 58.98004 | up | |
| (SEQ ID NO: 1663) | | | | | | | | |
| WAN0088PR_at | 87.5 | 11.42857 | Mm.268475 | 3E−34 | 90.243902 | 21.96429 | down | |
| (SEQ ID NO: 1589) | | | | | | | | |
| WAN0088Q6_at | 93.71585 | 63.43154 | Mm.261676 | 0 | 95.13382 | 71.2305 | down | |
| (SEQ ID NO: 1590) | | | | | | | | |
| WAN0088S8_at | 81.35593 | 76.12903 | Mm.29744 | 6E−97 | 86.097561 | 88.17204 | up | |
| (SEQ ID NO: 1591) | | | | | | | | |
| WAN0088T2_at | 88.53974 | 97.83002 | Mm.641 | 0 | 91.713748 | 96.0217 | up | |
| (SEQ ID NO: 1592) | | | | | | | | |
| WAN008CM7_x_at | 82.02247 | 25.35613 | Mm.354426 | 6E−13 | 84.466019 | 29.34473 | up | |
| (SEQ ID NO: 1597) | | | | | | | | |
| WAN008DGZ_at | 84.23423 | 79.42755 | Mm.269029 | 1E−139 | 89.861751 | 77.63864 | up | |
| (SEQ ID NO: 1606) | | | | | | | | |
| WAN008DJ8_f_at | 87.80488 | 24.84848 | Mm.331 | 2E−25 | 88.617886 | 24.84848 | down | |
| (SEQ ID NO: 1609) | | | | | | | | |
| WAN008DQE_at | 94.85294 | 100 | #N/A | 0 | 95.588235 | 100 | down | |
| (SEQ ID NO: 1612) | | | | | | | | |
| WAN008E2Q_at | 93.69565 | 100 | Mm.325827 | 0 | 95.869565 | 100 | up | |
| (SEQ ID NO: 1618) | | | | | | | | |
| WAN008EJY_at | | | #N/A | | | | up | |
| (SEQ ID NO: 1624) | | | | | | | | |
| WAN008ERB_at | 96.76113 | 99.39638 | Mm.274146 | 0 | 97.585513 | 100 | up | |
| (SEQ ID NO: 1631) | | | | | | | | |
| WAN013HVL_at | 89.38053 | 97.8355 | Mm.344831 | 1E−160 | 89.230769 | 98.48485 | up | |
| (SEQ ID NO: 1639) | | | | | | | | |
| WAN013HZ3_at | 91.83673 | 9.979633 | Mm.67949 | 4E−29 | 82.683983 | 47.04684 | down | |
| (SEQ ID NO: 1642) | | | | | | | | |
| WAN013I2L_at | 100 | 2.252252 | Mm.27943 | 1.00E−07 | 92 | 3.753754 | up | |
| (SEQ ID NO: 1651) | | | | | | | | |
| WAN013I3P_at | 86.70213 | 99.29577 | #N/A | 1E−172 | 88.6121 | 98.94366 | up | |
| (SEQ ID NO: 1653) | | | | | | | | |
| WAN013I61_at | | | Mm.2740 | 5E−30 | 88.28125 | 23.14647 | down | |
| (SEQ ID NO: 1654) | | | | | | | | |
| WAN013I6P_x_at | 87.71044 | 28.59206 | Mm.146649 | 0 | 89.771102 | 33.64621 | down | |
| (SEQ ID NO: 1658) | | | | | | | | |
| Y00365_at | 93.97993 | 23.39593 | Mm.313345 | 1E−145 | 88.84058 | 53.99061 | up | |
| (SEQ ID NO: 1674) | | | | | | | | |
| AF081143_at | 90.7173 | 98.34025 | Mm.324762 | 4E−93 | 92.946058 | 100 | 1.28 | |
| (SEQ ID NO: 1585) | | | | | | | | |
| WAN0088PT_at | 92.29167 | 99.58506 | Mm.157105 | 0 | 94.560669 | 99.17012 | down | protein |
| (SEQ ID NO: 1556) | | | | | | | | degradation |
| WAN0088XH_at | 87.41722 | 68.48073 | Mm.29151 | 1E−144 | 91.463415 | 92.97052 | −1.3 | UPR and ERAD |
| (SEQ ID NO: 1557) | | | | | | | | |
| WAN008CM1_x_at | 0 | 0 | 0 | #N/A | 0 | 0 | 0 | |
| (SEQ ID NO: 1559) | | | | | | | | |
| WAN008D6J_at | 94.80519 | 33.33333 | Mm.157190 | 1E−130 | 90.444444 | 97.4026 | −1.52 | transcriptional |
| (SEQ ID NO: 1563) | | | | | | | | cofactor |
| WAN008DSE_at | 86.89024 | 60.18349 | Mm.6379 | 1E−117 | 90.643275 | 62.75229 | −2.91 | glutamate/neutral |
| (SEQ ID NO: 1566) | | | | | | | | amino acid |
| | | | | | | | | transporter |
| WAN008EBJ_at | 87.61329 | 61.86916 | Mm.123714 | 1E−175 | 90.707071 | 92.52336 | −1.45 | cytoskeleton/ |
| (SEQ ID NO: 1569) | | | | | | | | actin binding |
| WAN008EFS_at | 86.77686 | 22.08029 | Mm.210155 | 2E−54 | 88.392857 | 40.87591 | −1.27 | pyrimidine |
| (SEQ ID NO: 1570) | | | | | | | | metabolism; |
| | | | | | | | | oxidative stress |
| WAN008EGV_at | 92.8972 | 94.85816 | Mm.8070 | 0 | 94.018692 | 94.85816 | −1.53 | regulates |
| (SEQ ID NO: 1571) | | | | | | | | GTPase activity |
| WAN008EMQ_at | 91.85336 | 100 | Mm.25548 | 0 | 96.334012 | 100 | −1.54 | nuclear transport |
| (SEQ ID NO: 1572) | | | | | | | | |
| WAN008ERL_at | 95.56962 | 87.05234 | Mm.379298 | 1E−162 | 95.867769 | 100 | −1.36 | mitochondrial |
| (SEQ ID NO: 1573) | | | | | | | | fatty acid beta- |
| | | | | | | | | oxidation |
| WAN008ETP_at | 86.94158 | 97.65101 | Mm.24576 | 8E−89 | 88.926174 | 100 | −1.3 | unknown |
| (SEQ ID NO: 1574) | | | | | | | | function |
| WAN008EX2_x_at | 90.29851 | 100 | Mm.168 | 6E−63 | 97.761194 | 100 | −1.45 | transcriptional |
| (SEQ ID NO: 1575) | | | | | | | | regulator; binds |
| | | | | | | | | HDAC's |
| WAN013HUM_at | 92.77108 | 59.00474 | Mm.132226 | 1E−132 | 89.285714 | 99.52607 | −1.46 | translocation; |
| (SEQ ID NO: 1576) | | | | | | | | endocytosis |
| WAN013HWG_at | 6E−34 | 83.47826 | 42.43542435 | #N/A | 0 | 0 | 0 | |
| (SEQ ID NO: 1577) | | | | | | | | |
| WAN013HYO_at | 90.52224 | 100 | Mm.276856 | 0 | 91.472868 | 99.80658 | 1.24 | |
| (SEQ ID NO: 1579) | | | | | | | | |
| WAN013I38_at | 90.52133 | 38.36364 | Mm.216135 | 0 | 92.989691 | 88.18182 | −1.3 | cell growth |
| (SEQ ID NO: 1583) | | | | | | | | |
| WAN008CWC_x_at | | | #N/A | | | | 1.365 | |
| (SEQ ID NO: 1560) | | | | | | | | |
| WAN008E8M_at | 88.19095 | 85.77586 | Mm.291463 | 1E−162 | 91.255605 | 96.12069 | −1.50 | |
| (SEQ ID NO: 1568) | | | | | | | | |
| U48852_at | 81.76944 | 55.13673 | Mm.292567 | 0 | 88.799355 | 91.7221 | up | |
| (SEQ ID NO: 1502) | | | | | | | | |
| WAN013HX9_at | 91.71717 | 93.75 | Mm.290251 | 0 | 94.507576 | 100 | 1.56 | |
| (SEQ ID NO: 2066) | | | | | | | | |
| WAN013HZ1_at | 89.57447 | 84.68468 | #N/A | 0 | 91.754757 | 85.22523 | 1.46 | |
| (SEQ ID NO: 2067) | | | | | | | | |
| WAN013166_f_at | 92.25589 | 57.6699 | Mm.268000 | 1E−131 | 91.84953 | 61.94175 | −1.97 | |
| (SEQ ID NO: 1494) | | | | | | | | |
| WAN013IAB_x_at | 82.44767 | 48.85917 | #N/A | 1E−133 | 81.320451 | 48.85917 | −1.45 | |
| (SEQ ID NO: 1496) | | | | | | | | |
| WAN0088OD_at | | | Mm.27769 | | | | down | |
| (SEQ ID NO: 2068) | | | | | | | | |
| WAN0088OT_at | | | #N/A | | | | down | |
| (SEQ ID NO: 1479) | | | | | | | | |
| WAN0088U4_at | | | | | | | down | |
| (SEQ ID NO: 2069) | | | | | | | | |
| WAN008DRM_at | | | Mm.9075 | | | | up | |
| (SEQ ID NO: 1503) | | | | | | | | |
| WAN008EEK_at | | | #N/A | | | | down | |
| (SEQ ID NO: 2070) | | | | | | | | |
| WAN008F2S_at | | | #N/A | | | | down | |
| SEQ ID NO: 1489 | | | | | | | | |
| AF115410_s_at | 86.09626 | 28.90263 | Mm.22001 | 2E−69 | 92.035398 | 34.93045 | up | |
| (SEQ ID NO: 2071) | | | | | | | | |
| AF157566_at | 86.81055 | 96.30485 | Mm.284853 | 1E−159 | 91.454965 | 100 | up | |
| (SEQ ID NO: 2072) | | | | | | | | |
| WAN0088SH_at | 91.15789 | 97.53593 | Mm.6766 | 0 | 94.045175 | 100 | up | |
| (SEQ ID NO: 2073) | | | | | | | | |
| WAN0088Y2_at | 90.99265 | 100 | Mm.356653 | 0 | 93.566176 | 100 | down | |
| (SEQ ID NO: 1882) | | | | | | | | |
| WAN0088ZI_at | 93.70504 | 100 | Mm.273997 | 0 | 96.402878 | 100 | down | |
| (SEQ ID NO: 2074) | | | | | | | | |
| WAN0088ZJ_at | 88.57678 | 100 | Mm.4580 | 0 | 93.796992 | 99.62547 | up | |
| (SEQ ID NO: 2075) | | | | | | | | |
| WAN00896L_f_at | 0 | 0 | #N/A | 0 | 0 | 0 | up | |
| (SEQ ID NO: 2076) | | | | | | | | |
| WAN008BNG_at | 93.77778 | 45.91837 | Mm.31247 | 1E−85 | 92.888889 | 45.91837 | up | |
| (SEQ ID NO: 1780) | | | | | | | | |
| WAN008CI5_at | 89.21283 | 68.6 | Mm.289747 | 1E−142 | 93.586006 | 68.6 | down | |
| (SEQ ID NO: 1839) | | | | | | | | |
| WAN008CRQ_at | 0 | 0 | #N/A | 7E−38 | 87.755102 | 43.1338 | up | |
| (SEQ ID NO: 2077) | | | | | | | | |
| WAN008CRX_at | 93.85343 | 77.47253 | Mm.213991 | 0 | 95.774648 | 78.02198 | down | |
| (SEQ ID NO: 2078) | | | | | | | | |
| WAN008D4W_at | 86.29738 | 97.44318 | Mm.373627 | 1E−96 | 89.389068 | 88.35227 | up | |
| (SEQ ID NO: 2079) | | | | | | | | |
| WAN008DGZ_at | 84.23423 | 79.42755 | #N/A | 1E−143 | 89.861751 | 77.63864 | down | |
| (SEQ ID NO: 1606) | | | | | | | | |
| WAN008DJI_at | 91.52542 | 48.86128 | Mm.28693 | 1E−120 | 89.333333 | 77.63975 | down | |
| (SEQ ID NO: 2080) | | | | | | | | |
| WAN008DKS_at | 92.16867 | 68.73706 | Mm.2720 | 0 | 93.390192 | 97.10145 | up | |
| (SEQ ID NO: 1787) | | | | | | | | |
| WAN008DL6_at | 85.06024 | 81.69291 | #N/A | 0 | 0 | 0 | up | |
| (SEQ ID NO: 2081) | | | | | | | | |
| WAN008DWE_at | 85.85859 | 38.22394 | Mm.7271 | 3E−81 | 90.118577 | 97.6834 | up | |
| (SEQ ID NO: 2082) | | | | | | | | |
| WAN008E71_at | 93.46939 | 51.90678 | Mm.208286 | 1E−97 | 93.469388 | 51.90678 | down | |
| (SEQ ID NO: 2083) | | | | | | | | |
| WAN008E8M_at | 88.19095 | 85.77586 | Mm.291463 | 1E−160 | 91.03139 | 96.12069 | up | |
| (SEQ ID NO: 1568) | | | | | | | | |
| WAN008EDZ_at | 85.99222 | 99.2278 | Mm.18210 | 1E−153 | 88.223938 | 100 | down | |
| (SEQ ID NO: 2084) | | | | | | | | |
| WAN008EHM_at | 91.38756 | 36.60245 | Mm.200608 | 1E−91 | 90.740741 | 47.28546 | up | |
| (SEQ ID NO: 1709) | | | | | | | | |
| WAN008EIX_at | 0 | 0 | #N/A | 0 | 0 | 0 | up | |
| (SEQ ID NO: 2085) | | | | | | | | |
| WAN008EP8_at | 91.71975 | 41.97861 | Mm.310476 | 2E−93 | 88.055556 | 96.25668 | down | |
| (SEQ ID NO: 2086) | | | | | | | | |
| WAN008EXG_at | 88.66499 | 95.43269 | Mm.215288 | 1E−145 | 91.105769 | 100 | down | |
| (SEQ ID NO: 1901) | | | | | | | | |
| WAN013HV6_x_at | 88.23529 | 16.66667 | #N/A | 1E−17 | 86.419753 | 19.85294 | up | |
| (SEQ ID NO: 2087) | | | | | | | | |
| WAN013HV8_x_at | 87.96992 | 54.28571 | #N/A | 1E−08 | 86.153846 | 26.53061 | up | |
| (SEQ ID NO: 2088) | | | | | | | | |
| WAN013HW2_at | 91.59213 | 99.28952 | Mm.18472 | 0 | 92.895204 | 100 | down | |
| (SEQ ID NO: 2089) | | | | | | | | |
| WAN13HZ6_at | 88.69779 | 70.29361 | Mm.3444 | 1E−144 | 90.092166 | 74.95682 | down | |
| (SEQ ID NO: 2090) | | | | | | | | |
| WAN013HZJ_at | 93.22344 | 100 | Mm.3868 | 0 | 96.520147 | 100 | down | |
| (SEQ ID NO: 2091) | | | | | | | | |
| WAN013I0C_at | 91.60839 | 72.95918 | Mm.10702 | 0 | 92.030361 | 89.62585 | down | |
| (SEQ ID NO: 2092) | | | | | | | | |
| WAN013I3P_at | 86.70213 | 99.29577 | #N/A | 1E−172 | 88.6121 | 98.94366 | down | |
| (SEQ ID NO: 1653) | | | | | | | | |
| WAN013I43_at | 87.55869 | 91.22056 | Mm.329631 | 1E−148 | 90.322581 | 92.93362 | up | |
| (SEQ ID NO: 2093) | | | | | | | | |
| WAN013I8C_at | 88.02281 | 39.02077 | Mm.259 | 0 | 94.230769 | 57.8635 | up | |
| (SEQ ID NO: 2094) | | | | | | | | |
| WAN008DT7_at | 83.94366 | 60.89194 | Mm.378931 | 1E−102 | 87.272727 | 66.03774 | up | |
| (SEQ ID NO: 1486) | | | | | | | | |
| WAN008EKU_at | 89.5122 | 99.51456 | Mm.431979 | 0 | 0 | 0 | up | |
| (SEQ ID NO: 1741) | | | | | | | | |
| WAN013I4A_at | 85.54502 | 64.03642 | Mm.4512 | 0 | 91.493056 | 43.70258 | up | |
| (SEQ ID NO: 2095) | | | | | | | | |
| AF242536_at | 91.66667 | 99.31034 | Mm.30199 | 0 | 94.645941 | 99.82759 | down | |
| (SEQ ID NO: 2096) | | | | | | | | |
| AJ223076_at | 89.83051 | 4.39315 | #N/A | 8E−52 | 83.409091 | 32.76247 | down | |
| (SEQ ID NO: 2097) | | | | | | | | |
| WAN008CTZ_at | 90.28213 | 56.56028 | Mm.252080 | 1E−153 | 93.989071 | 64.89362 | down | |
| (SEQ ID NO: 2098) | | | | | | | | |
| WAN008D16_at | 90.9589 | 65.29517 | Mm.306663 | 1E−164 | 94.850949 | 66.01073 | down | |
| (SEQ ID NO: 2099) | | | | | | | | |
| WAN008DCP_at | 90.84507 | 100 | Mm.28140 | 0 | 95.422535 | 100 | down | |
| (SEQ ID NO: 2100) | | | | | | | | |
| WAN008DIE_at | 90.41096 | 55.40797 | Mm.212395 | 1E−102 | 90.031153 | 60.91082 | down | |
| (SEQ ID NO: 2101) | | | | | | | | |
| WAN008DKD_at | 90.41769 | 100 | Mm.268010 | 1E−156 | 92.137592 | 100 | down | |
| (SEQ ID NO: 2102) | | | | | | | | |
| WAN008DMP_at | 90.52863 | 94.19087 | Mm.142822 | 0 | 92.982456 | 94.60581 | down | |
| (SEQ ID NO: 1968) | | | | | | | | |
| WAN008DOG_at | 0 | 0 | #N/A | 0 | 0 | 0 | up | |
| (SEQ ID NO: 2103) | | | | | | | | |
| WAN008E2D_at | 86.92308 | 24.90421 | Mm.23656 | 9E−62 | 94.267516 | 30.07663 | up | |
| (SEQ ID NO: 2104) | | | | | | | | |
| WAN008ECD_at | 94.43299 | 99.58932 | Mm.275281 | 0 | 96.701031 | 99.58932 | down | |
| (SEQ ID NO: 1898) | | | | | | | | |
| WAN008EGD_at | 0 | 0 | #N/A | 3E−18 | 96.428571 | 10.44776 | up | |
| (SEQ ID NO: 2105) | | | | | | | | |
| WAN008ERJ_x_at | 0 | 0 | #N/A | 2E−13 | 86.746988 | 69.7479 | down | |
| (SEQ ID NO: 2106) | | | | | | | | |
| WAN008ET2_at | 89.87854 | 44.58484 | Mm.252316 | 1E−103 | 90.939597 | 53.79061 | down | |
| (SEQ ID NO: 2107) | | | | | | | | |
| WAN008EVI-rc_at | 90.83333 | 51.06383 | Mm.12926 | 2E−76 | 90.638298 | 100 | down | |
| (SEQ ID NO: 1902) | | | | | | | | |
| WAN008F32_at | 0 | 0 | #N/A | 0 | 0 | 0 | up | |
| (SEQ ID NO: 2108) | | | | | | | | |
| WAN013HVM_at | 0 | 0 | #N/A | 4E−32 | 87.272727 | 32.16374 | up | |
| (SEQ ID NO: 2109) | | | | | | | | |
| WAN013HVV_at | 88.36735 | 91.41791 | Mm.182912 | 0 | 93.632959 | 99.62687 | down | |
| (SEQ ID NO: 2110) | | | | | | | | |
| WAN013HWQ_x_at | 88.74172 | 84.83146 | Mm.267258 | 2E−51 | 91.176471 | 95.50562 | up | |
| (SEQ ID NO: 2111) | | | | | | | | |
| WAN013HY1_at | 87.13551 | 85.73529 | Mm.293233 | 0 | 92.380952 | 92.64706 | down | |
| (SEQ ID NO: 2112) | | | | | | | | |
| WAN013I0A_x_at | 83.39695 | 99.05482 | Mm.51049 | 1E−173 | 89.694656 | 99.05482 | down | |
| (SEQ ID NO: 2113) | | | | | | | | |
| WAN013I26_at | 89.26746 | 98.16054 | Mm.279195 | 0 | 94.067797 | 98.66221 | down | |
| (SEQ ID NO: 2114) | | | | | | | | |
| WAN013I30_at | 90.54545 | 100 | Mm.87773 | 0 | 93.272727 | 100 | down | |
| (SEQ ID NO: 1528) | | | | | | | | |
| WAN013I3A_at | 87.27273 | 58.82353 | #N/A | 3E−80 | 85.529716 | 68.98396 | down | |
| (SEQ ID NO: 2115) | | | | | | | | |
| WAN013I8P_at | 86.23853 | 93.32192 | Mm.486 | 0 | 91.202873 | 95.37671 | down | |
| (SEQ ID NO: 1728) | | | | | | | | |
| X53077_x_at | 0 | 0 | #N/A | 0 | 0 | 0 | down | |
| (SEQ ID NO: 2116) | | | | | | | | |
| AF121895_at | 93.50649 | 38.98734 | #N/A | 3E−63 | 91.666667 | 16.20253 | up | |
| (SEQ ID NO: 2117) | | | | | | | | |
| WAN008BNY_at | 92.30769 | 84.0796 | Mm.4467 | 1E−146 | 94.378698 | 84.0796 | up | |
| (SEQ ID NO: 1791) | | | | | | | | |
| WAN008CNN_at | 87.24584 | 97.30216 | Mm.241484 | 0 | 90.28777 | 100 | up | |
| (SEQ ID NO: 2118) | | | | | | | | |
| WAN008EOG_at | 0 | 0 | #N/A | 1E−17 | 89.74359 | 48.14815 | up | |
| (SEQ ID NO: 2119) | | | | | | | | |
| WAN013HYK_at | 89.28571 | 14.50777 | Mm.235346 | 2E−13 | 93.75 | 13.81693 | down | |
| (SEQ ID NO: 1716) | | | | | | | | |
| Y12837_at | 96.12756 | 100 | Mm.259021 | 0 | 97.722096 | 100 | up | |
| (SEQ ID NO: 2120) | | | | | | | | |
| AF004831_at | 88.88889 | 6.766917 | Mm.240336 | 5E−84 | 89.440994 | 24.21053 | down | |
| (SEQ ID NO: 1536) | | | | | | | | |
| AF072727_at | 87.41722 | 59.80198 | Mm.200499 | 1E−134 | 87.474747 | 98.0198 | up | |
| (SEQ ID NO: 2121) | | | | | | | | |
| AF081142_at | 90.21277 | 50 | Mm.297372 | 1E−114 | 93.571429 | 59.57447 | up | |
| (SEQ ID NO: 2122) | | | | | | | | |
| D86467_at | 86.19048 | 71.91781 | Mm.856 | 2E−40 | 86.740331 | 61.9863 | down | |
| (SEQ ID NO: 2123) | | | | | | | | |
| M12329_g_at | 92.34973 | 100 | #N/A | 0 | 96.994536 | 100 | up | |
| (SEQ ID NO: 1942) | | | | | | | | |
| M22350_at | 84.57711 | 79.44664 | #N/A | 3E−57 | 90.607735 | 71.5415 | up | |
| (SEQ ID NO: 2124) | | | | | | | | |
| U49841_at | 87.85047 | 8.478605 | Mm.20931 | 1E−111 | 93.081761 | 25.1981 | down | |
| (SEQ ID NO: 2125) | | | | | | | | |
| WAN0088K3_at | 0 | 0 | #N/A | 7E−07 | 86.25 | 15.74803 | down | |
| (SEQ ID NO: 2126) | | | | | | | | |
| WAN0088MM_at | 0 | 0 | #N/A | 9E−16 | 84.269663 | 32.42259 | down | |
| (SEQ ID NO: 2127) | | | | | | | | |
| WAN0088PU_at | 92.61538 | 62.74131 | Mm.34319 | 0 | 92.815534 | 99.42085 | up | |
| (SEQ ID NO: 2128) | | | | | | | | |
| WAN0088X9_at | 89.17379 | 66.73004 | Mm.275864 | 1E−161 | 92.156863 | 87.26236 | up | |
| (SEQ ID NO: 1553) | | | | | | | | |
| WAN0088Z7_at | 90.47619 | 100 | Mm.352239 | 0 | 93.121693 | 100 | up | |
| (SEQ ID NO: 2129) | | | | | | | | |
| WAN008900_at | 90.52823 | 99.81818 | Mm.259688 | 0 | 95.264117 | 99.81818 | down | |
| (SEQ ID NO: 2130) | | | | | | | | |
| WAN008CN4_at | 0 | 0 | #N/A | 1E−14 | 89.189189 | 14.01515 | down | |
| (SEQ ID NO: 2131) | | | | | | | | |
| WAN008CS2_at | 91.89189 | 96.73203 | Mm.288718 | 0 | 97.285068 | 96.2963 | down | |
| (SEQ ID NO: 1694) | | | | | | | | |
| WAN008CSN_at | 87.82961 | 99.79757 | #N/A | 0 | 92.712551 | 100 | down | |
| (SEQ ID NO: 2132) | | | | | | | | |
| WAN008D3X_at | 89.6875 | 59.81308 | Mm.277719 | 1E−161 | 94.010417 | 71.7757 | down | |
| (SEQ ID NO: 2133) | | | | | | | | |
| WAN008DBL_at | 85.76923 | 93.86282 | Mm.322294 | 1E−180 | 90.679612 | 92.96029 | up | |
| (SEQ ID NO: 1730) | | | | | | | | |
| WAN008DK1_at | 85.66879 | 64.87603 | Mm.335460 | 1E−110 | 91.082803 | 64.87603 | up | |
| (SEQ ID NO: 1829) | | | | | | | | |
| WAN008DLQ_at | 80.27613 | 99.80315 | Mm.41 | 1E−139 | 87.351779 | 99.6063 | up | |
| (SEQ ID NO: 2134) | | | | | | | | |
| WAN008DNO_at | 88.78719 | 80.18349 | Mm.33870 | 1E−160 | 90.212766 | 86.23853 | down | |
| (SEQ ID NO: 2135) | | | | | | | | |
| WAN008DRQ_x_at | 84.52381 | 100 | Mm.158231 | 1E−16 | 88.095238 | 100 | down | |
| (SEQ ID NO: 2136) | | | | | | | | |
| WAN008DXB_f_at | 0 | 0 | #N/A | 0 | 0 | 0 | up | |
| (SEQ ID NO: 2137) | | | | | | | | |
| WAN008E1P_at | 84.32304 | 75.99278 | Mm.274811 | 0 | 92.960289 | 100 | up | |
| (SEQ ID NO: 2138) | | | | | | | | |
| WAN008E8D_at | 93.12039 | 98.54722 | Mm.222328 | 0 | 97.783251 | 98.30508 | down | |
| (SEQ ID NO: 2139) | | | | | | | | |
| WAN008EEE_at | 96.33803 | 100 | Mm.289662 | 1E−160 | 98.309859 | 100 | down | |
| (SEQ ID NO: 2140) | | | | | | | | |
| WAN008EH6_at | 93.63636 | 97.86477 | Mm.2863 | 0 | 95.272727 | 97.86477 | down | |
| (SEQ ID NO: 2141) | | | | | | | | |
| WAN008EHM_at | 91.38756 | 38.60245 | Mm.200608 | 1E−91 | 90.740741 | 47.28546 | up | |
| (SEQ ID NO: 1709) | | | | | | | | |
| WAN008EK5- | 92.66055 | 21.84369 | #N/A | 7E−44 | 94.782609 | 23.04609 | down | |
| rc_x_at | | | | | | | | |
| (SEQ ID NO: 1979) | | | | | | | | |
| WAN008EKV_at | 90.8 | 51.12474 | Mm.30221 | 0 | 91.908714 | 98.56851 | down | |
| (SEQ ID NO: 2142) | | | | | | | | |
| WAN008EN3_at | 0 | 0 | Mm.29482 | 3E−78 | 90.163934 | 95.3125 | down | |
| (SEQ ID NO: 2142) | | | | | | | | |
| WAN008EOR_x_at | 0 | 0 | #N/A | 0 | 0 | 0 | down | |
| (SEQ ID NO: 2144) | | | | | | | | |
| WAN008EPF_at | 97.07792 | 98.71795 | Mm.317701 | 1E−152 | 97.077922 | 98.71795 | down | |
| (SEQ ID NO: 2145) | | | | | | | | |
| WAN008EPP_at | 0 | 0 | Mm.291799 | 3E−20 | 89.010989 | 29.93421 | down | |
| (SEQ ID NO: 2146) | | | | | | | | |
| WAN008ERQ_at | 90.43478 | 92 | Mm.335292 | 4E−93 | 93.248945 | 94.8 | down | |
| (SEQ ID NO: 2147) | | | | | | | | |
| WAN008ESB_at | 88.09524 | 17.17791 | #N/A | 2E−25 | 98.4375 | 13.08793 | down | |
| (SEQ ID NO: 2148) | | | | | | | | |
| WAN008ESS_at | 0 | 0 | #N/A | 4E−14 | 92.857143 | 17.99486 | down | |
| (SEQ ID NO: 2149) | | | | | | | | |
| WAN008ET4_at | 91.47122 | 99.78723 | Mm.29045 | 0 | 94.468085 | 100 | down | |
| (SEQ ID NO: 2150) | | | | | | | | |
| WAN008EWS_at | 93.45133 | 100 | Mm.22724 | 0 | 93.451327 | 100 | down | |
| (SEQ ID NO: 1688) | | | | | | | | |
| WAN008F30_f_at | 94.18605 | 43.65482 | #N/A | 2E−41 | 87.700535 | 94.92386 | up | |
| (SEQ ID NO: 2151) | | | | | | | | |
| WAN013HU8_at | 89.98035 | 99.22027 | Mm.26833 | 0 | 92.730845 | 99.22027 | down | |
| (SEQ ID NO: 2152) | | | | | | | | |
| WAN013HVQ_f_at | 90.93333 | 100 | Mm.18516 | 1E−166 | 94.4 | 100 | up | |
| (SEQ ID NO: 2153) | | | | | | | | |
| WAN013HW1_at | 84.05797 | 99.45946 | Mm.258927 | 0 | 91.240876 | 98.73874 | up | |
| (SEQ ID NO: 1989) | | | | | | | | |
| WAN013HWP_x_at | 0 | 0 | #N/A | 8E−76 | 92.822967 | 45.93407 | down | |
| (SEQ ID NO: 1707) | | | | | | | | |
| WAN013HX0_at | 90.90909 | 8.747515 | #N/A | 8E−15 | 84.313725 | 20.27833 | down | |
| (SEQ ID NO: 2154) | | | | | | | | |
| WAN013HX2_x_at | 0 | 0 | #N/A | 0 | 0 | 0 | up | |
| (SEQ ID NO: 2155) | | | | | | | | |
| WAN013HXU_at | 92.22011 | 100 | Mm.121265 | 0 | 94.847328 | 99.43074 | down | |
| (SEQ ID NO: 2156) | | | | | | | | |
| WAN013I3S_at | 88.95028 | 98.36957 | Mm.10247 | 0 | 92.753623 | 100 | up | |
| (SEQ ID NO: 2157) | | | | | | | | |
| WAN013I40_at | 90.72682 | 100 | #N/A | 1E−165 | 93.483709 | 100 | up | |
| (SEQ ID NO: 2158) | | | | | | | | |
| WAN013I98_at | 84.09332 | 87.23404 | Mm.15312 | 0 | 90.04329 | 85.47641 | up | |
| (SEQ ID NO: 1818) | | | | | | | | |
| X98066_at | 91.30435 | 47.02602 | Mm.426637 | 0 | 0 | 0 | down | |
| (SEQ ID NO: 2159) | | | | | | | | |
| AF004814_at | 89.15663 | 49.25816 | Mm.240044 | 0 | 93.655589 | 65.47972 | up | |
| (SEQ ID NO: 2160) | | | | | | | | |
| WAN008939_at | 90.26549 | 20.58288 | #N/A | 0 | 0 | 0 | up | |
| (SEQ ID NO: 2161) | | | | | | | | |
| WAN008DZC_x_at | 0 | 0 | #N/A | 0 | 0 | 0 | up | |
| (SEQ ID NO: 2162) | | | | | | | | |
| WAN013HVW_at | 0 | 0 | Mm.193096 | 8E−07 | 88.679245 | 9.330986 | down | |
| (SEQ ID NO: 1926) | | | | | | | | |
| WAN013HWY_at | 86.55914 | 76.07362 | Mm.181074 | 1E−171 | 90.57377 | 99.7955 | up | |
| (SEQ ID NO: 1710) | | | | | | | | |
| WAN013HZQ_at | 0 | 0 | #N/A | 0 | 0 | 0 | up | |
| (SEQ ID NO: 2163) | | | | | | | | |
| Y11149_at | 90.86538 | 71.84801 | Mm.270278 | 1E−173 | 93.509615 | 71.84801 | up | |
| (SEQ ID NO: 2164) | | | | | | | | |
| WAN0088J1_at | 90 | 34.1556 | Mm.203928 | 1E−103 | 94.023904 | 47.62808 | down | |
| (SEQ ID NO: 2165) | | | | | | | | |
| WAN008BOI_at | 0 | 0 | #N/A | 6E−25 | 85.096154 | 58.10056 | down | |
| (SEQ ID NO: 2166) | | | | | | | | |
| WAN008BR0_at | 83.95062 | 15.0838 | Mm.230169 | 6E−26 | 88.80597 | 24.95345 | down | |
| (SEQ ID NO: 1773) | | | | | | | | |
| WAN008BR4_at | 90.51724 | 24.26778 | #N/A | 2E−10 | 90.909091 | 11.50628 | down | |
| (SEQ ID NO: 2167) | | | | | | | | |
| WAN008CLK_at | 88.47737 | 48.21429 | #N/A | 1E−161 | 92.073171 | 97.61905 | down | |
| (SEQ ID NO: 1552) | | | | | | | | |
| WAN008CPX_at | 89.52991 | 94.54545 | Mm.299167 | 0 | 92.244898 | 98.9899 | down | |
| (SEQ ID NO: 2168) | | | | | | | | |
| WAN008D2Y_at | 94.58333 | 97.56098 | #N/A | 0 | 97.959184 | 99.5935 | down | |
| (SEQ ID NO: 2169) | | | | | | | | |
| WAN008DTC_at | 92.69231 | 98.48485 | Mm.249700 | 4E−99 | 92.664093 | 98.10606 | up | |
| (SEQ ID NO: 2170) | | | | | | | | |
| WAN008ECX_at | 86.36364 | 65.0647 | Mm.30246 | 1E−155 | 94.857143 | 64.69501 | down | |
| (SEQ ID NO: 1759) | | | | | | | | |
| WAN008EGM_at | 83.53659 | 29.76407 | Mm.279865 | 1E−122 | 86.912065 | 88.74773 | down | |
| (SEQ ID NO: 2171) | | | | | | | | |
| WAN008EHM_at | 91.38756 | 36.60245 | Mm.200608 | 1E−91 | 90.740741 | 47.28546 | down | |
| (SEQ ID NO: 1709) | | | | | | | | |
| WAN013HUO_at | 85.66553 | 98.98649 | Mm.29845 | 1E−159 | 86.713287 | 96.62162 | down | |
| (SEQ ID NO: 2172) | | | | | | | | |
| WAN013HY0_at | 89.25319 | 100 | Mm.358657 | 0 | 93.260474 | 100 | down | |
| (SEQ ID NO: 2173) | | | | | | | | |
| WAN013I3P_at | 86.70213 | 99.29577 | #N/A | 1E−172 | 88.6121 | 98.94366 | down | |
| (SEQ ID NO: 1653) | | | | | | | | |
| WAN013I6C_at | 84.47205 | 12.69716 | Mm.9086 | 1E−111 | 87.239583 | 30.28391 | down | |
| (SEQ ID NO: 1655) | | | | | | | | |
| WAN013I9G_at | 84.85437 | 38.06356 | Mm.4114 | 0 | 88.596491 | 58.98004 | down | |
| (SEQ ID NO: 1663) | | | | | | | | |
| WAN013I9M_x_at | 85.36804 | 80.20158 | #N/A | 0 | 88.778878 | 87.25702 | up | |
| (SEQ ID NO: 2174) | | | | | | | | |
| WAN013I9N_at | 91.07981 | 78.30882 | Mm.227260 | 0 | 95.194085 | 99.44853 | up | |
| (SEQ ID NO: 2175) | | | | | | | | |
| M26640_at | 82.96296 | 94.57093 | Mm.200608 | 0 | 91.843972 | 98.77408 | down | |
| (SEQ ID NO: 2054) | | | | | | | | |
| WAN0088OE_at | 94.35484 | 77.01863 | Mm.280125 | 0 | 97.043011 | 77.01863 | down | |
| (SEQ ID NO: 2176) | | | | | | | | |
| WAN0088S8_at | 81.35593 | 76.12903 | Mm.29744 | 5E−97 | 86.097561 | 88.17204 | down | |
| (SEQ ID NO: 1591) | | | | | | | | |
| WAN008CRQ_at | 0 | 0 | #N/A | 7E−38 | 87.755102 | 43.1338 | down | |
| (SEQ ID NO: 2077) | | | | | | | | |
| WAN008CSC_at | 89.14591 | 99.29329 | Mm.250004 | 0 | 92.932862 | 100 | down | |
| (SEQ ID NO: 2177) | | | | | | | | |
| WAN008CTA_at | 89.12387 | 59.63964 | Mm.402190 | 3E−28 | 89.908257 | 19.63964 | down | |
| (SEQ ID NO: 1957) | | | | | | | | |
| WAN008CZB_at | 93.05556 | 100 | Mm.9257 | 0 | 94.715447 | 97.61905 | down | |
| (SEQ ID NO: 2178) | | | | | | | | |
| WAN008D0D_x_at | 0 | 0 | Mm.11778 | 3E−25 | 85.276074 | 28.69718 | down | |
| (SEQ ID NO: 2179) | | | | | | | | |
| WAN008D0K_at | 86.77494 | 96.85393 | Mm.173758 | 1E−143 | 89.864865 | 99.77528 | down | |
| (SEQ ID NO: 1877) | | | | | | | | |
| WAN008D6B_at | 0 | 0 | #N/A | 0 | 0 | 0 | down | |
| (SEQ ID NO: 2180) | | | | | | | | |
| WAN008DMI_at | 85 | 96.60107 | Mm.292056 | 0 | 89.94614 | 99.64222 | down | |
| (SEQ ID NO: 1610) | | | | | | | | |
| WAN008DQM_at | 88.11881 | 99.60552 | Mm.99776 | 0 | 92.504931 | 100 | down | |
| (SEQ ID NO: 2181) | | | | | | | | |
| WAN008DTZ_at | 87.67606 | 63.39286 | Mm.21145 | 1E−106 | 88.732394 | 79.24107 | up | |
| (SEQ ID NO: 2182) | | | | | | | | |
| WAN008E21_at | 93.10345 | 66.33987 | Mm.2444 | 2E−76 | 92.018779 | 69.60784 | down | |
| (SEQ ID NO: 2183) | | | | | | | | |
| WAN008E6J_x_at | 0 | 0 | #N/A | 2E−06 | 89.361702 | 40.86957 | down | |
| (SEQ ID NO: 2184) | | | | | | | | |
| WAN008EAJ_at | 86.45038 | 98.49624 | Mm.2238 | 0 | 94.274809 | 98.49624 | down | |
| (SEQ ID NO: 2185) | | | | | | | | |
| WAN008EAK_at | 90.09009 | 91.92547 | Mm.386789 | 1E−158 | 90.950226 | 91.51139 | down | |
| (SEQ ID NO: 2186) | | | | | | | | |
| WAN008EFI_at | 88.27709 | 98.2548 | Mm.329136 | 0 | 91.448517 | 100 | down | |
| (SEQ ID NO: 2187) | | | | | | | | |
| WAN008EQ0_at | 89.44282 | 67.79324 | #N/A | 1E−143 | 93.641618 | 68.78728 | down | |
| (SEQ ID NO: 2188) | | | | | | | | |
| WAN008EV8_at | 88.35979 | 68.23105 | Mm.443 | 4E−84 | 91.056911 | 88.80866 | down | |
| (SEQ ID NO: 2189) | | | | | | | | |
| WAN008EYJ_at | 93.62416 | 74.31421 | Mm.28639 | 1E−134 | 95.049505 | 75.5611 | up | |
| (SEQ ID NO: 2190) | | | | | | | | |
| WAN008F02_at | 83.33333 | 21.79931 | Mm.124316 | 3E−83 | 85.522788 | 64.53287 | up | |
| (SEQ ID NO: 2191) | | | | | | | | |
| WAN008F1L_at | 90.23355 | 84.86486 | Mm.2154 | 1E−131 | 88.447653 | 99.81982 | down | |
| (SEQ ID NO: 1782) | | | | | | | | |
| WAN008F30_f_at | 94.18605 | 43.65482 | #N/A | 2E−41 | 87.700535 | 94.92386 | down | |
| (SEQ ID NO: 2151) | | | | | | | | |
| WAN013HUC_at | 85.71429 | 57.21739 | Mm.276325 | 1E−126 | 91.036415 | 62.08696 | up | |
| (SEQ ID NO: 2192) | | | | | | | | |
| WAN013HUX_at | 90.90909 | 34.714 | Mm.261025 | 1E−156 | 85.915493 | 98.02761 | down | |
| (SEQ ID NO: 2193) | | | | | | | | |
| WAN013HZ9_at | 90.15544 | 98.80546 | #N/A | 0 | 92.943201 | 99.14676 | down | |
| (SEQ ID NO: 2194) | | | | | | | | |
| WAN013I3K_at | 91.04478 | 99.44341 | Mm.9925 | 0 | 93.470149 | 99.44341 | up | |
| (SEQ ID NO: 1723) | | | | | | | | |
| WAN013I6G_at | 0 | 0 | #N/A | 0 | 0 | 0 | up | |
| (SEQ ID NO: 1999) | | | | | | | | |
| WAN013I8T_at | 90.74941 | 79.66418 | Mm.392113 | 0 | 94.362018 | 94.3097 | up | |
| (SEQ ID NO: 1999) | | | | | | | | |
| WAN013I9K_at | 84.64912 | 79.16667 | Mm.37199 | 1E−175 | 90.558767 | 90.10417 | up | |
| (SEQ ID NO: 2195) | | | | | | | | |
| AF056934_at | 87.04104 | 88.19048 | Mm.203 | 1E−159 | 90.17094 | 89.14286 | up | |
| (SEQ ID NO: 2196) | | | | | | | | |
| S74024_at | 87.73585 | 96.36364 | Mm.247036 | 6E−64 | 89.090909 | 100 | up | |
| (SEQ ID NO: 1832) | | | | | | | | |
| WAN008CJT_at | 89.39759 | 78.44991 | Mm.7091 | 1E−179 | 90.766208 | 96.21928 | down | |
| (SEQ ID NO: 2197) | | | | | | | | |
| WAN008D1G_at | 89.72868 | 99.6139 | Mm.327675 | 0 | 90.891473 | 99.6139 | down | |
| (SEQ ID NO: 2198) | | | | | | | | |
| WAN008EFO_at | 90.94203 | 100 | Mm.275191 | 0 | 95.471014 | 100 | down | |
| (SEQ ID NO: 1825) | | | | | | | | |
| WAN008EQU_at | 92.40122 | 97.62611 | Mm.279821 | 1E−148 | 94.658754 | 100 | down | |
| (SEQ ID NO: 2199) | | | | | | | | |
| WAN008ERA_at | 0 | 0 | #N/A | 3E−24 | 89.130435 | 30.9417 | down | |
| (SEQ ID NO: 2200) | | | | | | | | |
| WAN013HUI_at | 96.53061 | 94.77756 | Mm.319512 | 0 | 97.270955 | 99.22631 | up | |
| (SEQ ID NO: 2045) | | | | | | | | |
| WAN013I9V_at | 92.71028 | 42.39303 | Mm.316355 | 0 | 94.827586 | 45.9588 | down | |
| (SEQ ID NO: 2201) | | | | | | | | |
| WAN013IA0_at | 0 | 0 | #N/A | 2E−12 | 84.615385 | 31.70732 | down | |
| (SEQ ID NO: 1495) | | | | | | | | |
| AF371373_at | 84.87713 | 39.36012 | #N/A | 0 | 87.015177 | 88.24405 | down | |
| (SEQ ID NO: 2202) | | | | | | | | |
| WAN008CY8_at | 82.01058 | 77.77778 | Mm.263355 | 5E−91 | 85.523385 | 92.38683 | up | |
| (SEQ ID NO: 2203) | | | | | | | | |
| WAN008DP1_x_at | 0 | 0 | #N/A | 0 | 0 | 0 | down | |
| (SEQ ID NO: 2204) | | | | | | | | |
| WAN008DRO_at | 0 | 0 | #N/A | 4E−27 | 86.956522 | 27.00587 | up | |
| (SEQ ID NO: 2205) | | | | | | | | |
| WAN008EGO_f_at | 0 | 0 | #N/A | 0 | 0 | 0 | up | |
| (SEQ ID NO: 2206) | | | | | | | | |
| WAN008EME_at | 0 | 0 | #N/A | 0 | 0 | 0 | down | |
| (SEQ ID NO: 2207) | | | | | | | | |
| WAN013I8N_at | 90.28974 | 95.36968 | Mm.6065 | 0 | 93.183579 | 96.41524 | up | |
| (SEQ ID NO: 1776) | | | | | | | | |
| Y12074_at | 90.07634 | 39.30983 | Mm.281885 | 0 | 91.732909 | 47.1868 | down | |
| (SEQ ID NO: 2208) | | | | | | | | |

[0175] TABLE 26
High Priority Gene list 3

| | | | | Human | | |
|---|---|---|---|---|---|---|
| Qualifier List | Category | Symbol | Title | Unigene ID | eValue | % ID |
| L00176_at | HMQP DAG | HMGCR | 3-hydroxy-3-methylglutaryl- | Hs.11899 | 6E−54 | 87.98077 |
| (SEQ ID | | | Coenzyme A reductase | | | |
| NO: 1500) | | | | | | |
| WAN0088ZP_at | HMQP DAG | PAWR | PRKC, apoptosis, WT1, regulator | Hs.406074 | 4E−10 | 91.52542 |
| (SEQ ID | | | | | | |
| NO: 1482) | | | | | | |
| WAN008CJ1_at | HMQP DAG | ERP70 | Protein disulfide isomerase- | Hs.93659 | 1E−120 | 89.62766 |
| (SEQ ID | | | associated 4 | | | |
| NO: 1485) | | | | | | |
| WAN008EA0_at | HMQP DAG | VCP | Valosin-containing protein | Hs.529782 | 0 | 90.72727 |
| (SEQ ID | | | | | | |
| NO: 1487) | | | | | | |
| D45419_at | HMQP DCU | Hcfc1 | Host cell factor C1 | Hs.83634 | 1E−22 | 84.86486 |
| (SEQ ID | | | | | | |
| NO: 1498) | | | | | | |
| WAN0088NU_at | HMQP DCU | LMNA | Lamin A/C | Hs.491359 | 3E−23 | 85.71429 |
| (SEQ ID | | | | | | |
| NO: 1478) | | | | | | |
| WAN008F1I_at | | SHOC2 | Soc-2 suppressor of clear | Hs.104315 | 2E−18 | 85.05747 |
| (SEQ ID | | | homolog (C. elegans) | | | |
| NO: 1488) | | | | | | |
| WAN013I1P_at | | HNRPA2B1 | Heterogeneous nuclear | Hs.487774 | 0 | 97.22222 |
| (SEQ ID | | | ribonucleoprotein A2/B1 | | | |
| NO: 1492) | | | | | | |
| WAN008DT7_at | | GSTO1 | Glutathione S-transferase | Hs.190028 | 5E−65 | 83.94366 |
| (SEQ ID | | | omega 1 | | | |
| NO: 1486) | | | | | | |

| | | Mouse | | | | | |
|---|---|---|---|---|---|---|---|
| Qualifier List | % QC | Unigene ID | eValue | % ID | % QC | FC | Function |
| L00176_at | 57.93872 | Mm.316652 | 4E−82 | 94.47236 | 55.43175 | up | |
| (SEQ ID | | | | | | | |
| NO: 1500) | | | | | | | |
| WAN0088ZP_at | 11.11111 | Mm.336104 | 9E−53 | 91.62562 | 38.22976 | up | |
| (SEQ ID | | | | | | | |
| NO: 1482) | | | | | | | |
| WAN008CJ1_at | 81.91721 | Mm.2442 | 1E−170 | 94.57364 | 84.31373 | up | |
| (SEQ ID | | | | | | | |
| NO: 1485) | | | | | | | |
| WAN008EA0_at | 99.63768 | Mm.379457 | 0 | 95.47101 | 100 | up | |
| (SEQ ID | | | | | | | |
| NO: 1487) | | | | | | | |
| D45419_at | 32.74336 | Mm.248353 | 1E−123 | 85.99291 | 99.82301 | down | transcription |
| (SEQ ID | | | | | | | factor |
| NO: 1498) | | | | | | | |
| WAN0088NU_at | 23.05026 | Mm.243014 | 0 | 92.04947 | 98.09359 | down | |
| (SEQ ID | | | | | | | |
| NO: 1478) | | | | | | | |
| WAN008F1I_at | 31.07143 | Mm.228669 | 1E−36 | 90.37037 | 24.10714 | −2.62 | |
| (SEQ ID | | | | | | | |
| NO: 1488) | | | | | | | |
| WAN013I1P_at | 90.94737 | Mm.155896 | 0 | 96.52778 | 90.94737 | −3.49 | pre-mRNA |
| (SEQ ID | | | | | | | processing |
| NO: 1492) | | | | | | | |
| WAN008DT7_at | 60.89194 | Mm.378931 | 1E−102 | 87.27273 | 66.03774 | −2.11 | redox |
| (SEQ ID | | | | | | | homeostasis; |
| NO: 1486) | | | | | | | stress |
| | | | | | | | response |

[0176] TABLE 27
HCGR 2 + 3 Overlap 1.2F UP (10)

| | | | Human | | |
|---|---|---|---|---|---|
| Qualifier List | Symbol | Title | Unigene ID | eValue | % ID |
| WAN013I0S_at | 4930548G07Rik | RIKEN cDNA 4930548G07 | #N/A | 4E−67 | 87.21804511 |
| (SEQ ID NO: 2209) | | gene | | | |
| WAN0088WF_at | DHX36 | DEAH (Asp-Glu-Ala-His) box | Hs.446270 | 2E−97 | 92.0754717 |
| (SEQ ID NO: 1874) | | polypeptide 36 | | | |
| WAN008EVU_x_at | HNRPK | Heterogeneous nuclear | Hs.522257 | 1E−129 | 92.98780488 |
| (SEQ ID NO: 1887) | | ribonucleoprotein K | | | |
| X51747_at | HSPB1 | Heat shock 27 kDa protein 1 | Hs.520973 | 1E−101 | 87.36842105 |
| (SEQ ID NO: 1587) | | | | | |
| WAN008D3S_x_at | IDE | Insulin-degrading enzyme | Hs.500546 | 0.0000001 | 89.65517241 |
| (SEQ ID NO: 2210) | | | | | |
| U62587_at | MGAT5 | Mannosyl (alpha-1,6-)- | Hs.22689 | 1E−160 | 87.03703704 |
| (SEQ ID NO: 2211) | | glycoprotein beta-1,6-N-acetyl- | | | |
| | | glucosaminyltransferase | | | |
| AF306662_at | MMP14 | Matrix metallopeptidase 14 | Hs.2399 | 0 | 89.7260274 |
| (SEQ ID NO: 1729) | | (membrane-inserted) | | | |
| WAN013I63_at | RPS15 | Ribosomal protein S15 | Hs.406683 | 1E−109 | 92.15017065 |
| (SEQ ID NO: 2212) | | | | | |
| WAN008BRK_at | Tmsb4x | Thymosin, beta 4, X | Hs.522584 | 1E−153 | 93.26683292 |
| (SEQ ID NO: 1594) | | chromosome | | | |
| WAN013I9L_x_at | UBB | Ubiquitin B | Hs.356190 | 3E−22 | 91.17647059 |
| (SEQ ID NO: 2213) | | | | | |

| | | Mouse | | | |
|---|---|---|---|---|---|
| Qualifier List | % QC | Unigene ID | eValue | % ID | % QC |
| WAN013I0S_at | 99.25373134 | Mm.152466 | 1E−104 | 92.91044776 | 100 |
| (SEQ ID NO: 2209) | | | | | |
| WAN0088WF_at | 55.67226891 | Mm.224233 | 1E−113 | 94.40298507 | 56.30252101 |
| (SEQ ID NO: 1874) | | | | | |
| WAN008EVU_x_at | 59.63636364 | Mm.142872 | 1E−170 | 90.58380414 | 96.54545455 |
| (SEQ ID NO: 1887) | | | | | |
| X51747_at | 50.53191489 | Mm.13849 | 0 | 91.95171026 | 66.09042553 |
| (SEQ ID NO: 1587) | | | | | |
| WAN008D3S_x_at | 29.14572864 | Mm.28366 | 8E−20 | 90.69767442 | 43.2160804 |
| (SEQ ID NO: 2210) | | | | | |
| U62587_at | 100 | Mm.214682 | 0 | 92.92929293 | 100 |
| (SEQ ID NO: 2211) | | | | | |
| AF306662_at | 99.82905983 | Mm.280175 | 0 | 90.08547009 | 100 |
| (SEQ ID NO: 1729) | | | | | |
| WAN013I63_at | 61.04166667 | Mm.643 | 1E−108 | 92.5795053 | 58.95833333 |
| (SEQ ID NO: 2212) | | | | | |
| WAN008BRK_at | 76.52671756 | Mm.142729 | 0 | 95.53398058 | 98.28244275 |
| (SEQ ID NO: 1594) | | | | | |
| WAN013I9L_x_at | 21.07438017 | Mm.282093 | 4E−26 | 90.47619048 | 21.69421488 |
| (SEQ ID NO: 2213) | | | | | |

[0177] TABLE 28
HCGR 2 + 3 Overlap 1.2F DOWN (115)

| | | | Human | | |
|---|---|---|---|---|---|
| | | | Unigene | | |
| Qualifier List | Symbol | Title | ID | eValue | % ID |
| WAN008CPA_at | 1200007-B05Rik | RIKEN cDNA 1200007B05 gene | #N/A | 9E−84 | 92.79279279 |
| (SEQ ID NO: 2214) | | | | | |
| WAN008DFA_at | 2310042-G06Rik | RIKEN cDNA 2310042G06 gene | #N/A | 1E−163 | 88.51851852 |
| (SEQ ID NO: 2215) | | | | | |
| WAN008DI2_at | 2510049-I19Rik | RIKEN cDNA 2510049I19 gene | #N/A | 3E−65 | 91.97860963 |
| (SEQ ID NO: 2216) | | | | | |
| WAN008D0K_at | AA408296 | Expressed sequence AA408296 | #N/A | 1E−110 | 86.774942 |
| (SEQ ID NO: 1877) | | | | | |
| WAN008CW0_at | AKAP12 | A kinase (PRKA) anchor protein | Hs.371240 | 2E−14 | 85.57692308 |
| (SEQ ID NO: 2217) | | (gravin) 12 | | | |
| WAN013I9E_at | Akr1b8 | Aldo-keto reductase family 1, | #N/A | 1E−136 | 87.52556237 |
| (SEQ ID NO: 2218) | | member B8 | | | |
| WAN0088LT_at | ALAS1 | Aminolevulinate, delta-, synthase 1 | Hs.476308 | 7E−95 | 85.8190709 |
| (SEQ ID NO: 2219) | | | | | |
| WAN008DGD_at | Aplp2 | Amyloid beta (A4) precursor-like | Hs.370247 | 0 | 0 |
| (SEQ ID NO: 1564) | | protein 2 | | | |
| WAN013I8H_x_at | APP | Amyloid beta (A4) precursor protein | Hs.642685 | 1E−77 | 83.89830508 |
| (SEQ ID NO: 1548) | | (peptidase nexin-II, Alzheimer | | | |
| | | disease) | | | |
| WAN0088T2_at | ATF4 | Activating transcription factor 4 (tax- | Hs.496487 | 1E−158 | 88.53974122 |
| (SEQ ID NO: 1592) | | responsive enhancer element B67) | | | |
| WAN008DS1_at | ATXN10 | Ataxin 10 | Hs.475125 | 1E−107 | 87.05035971 |
| (SEQ ID NO: 2220) | | | | | |
| WAN0088OB_at | BC017158 | CDNA sequence BC017158 | #N/A | 2E−69 | 84.3575419 |
| (SEQ ID NO: 2221) | | | | | |
| WAN013HXN_at | CAT | Catalase | Hs.502302 | 2E−71 | 92.74611399 |
| (SEQ ID NO: 2222) | | | | | |
| WAN008DU8_at | CCM2 | Cerebral cavernous malformation 2 | Hs.148272 | 1E−139 | 93.10344828 |
| (SEQ ID NO: 2223) | | | | | |
| WAN013I8J_at | CCNB2 | Cyclin B2 | Hs.194698 | 1E−173 | 86.92579505 |
| (SEQ ID NO: 2001) | | | | | |
| WAN0088YD_at | CCS | Copper chaperone for superoxide | Hs.502917 | 4E−96 | 83.89662028 |
| (SEQ ID NO: 2224) | | dismutase | | | |
| U42430_at | CD36 | CD36 molecule (thrombospondin | Hs.120949 | 6E−43 | 86.36363636 |
| (SEQ ID NO: 1673) | | receptor) | | | |
| WAN013HYB_at | CLIC1 | Chloride intracellular channel 1 | Hs.414565 | 1E−114 | 87.5 |
| (SEQ ID NO: 2225) | | | | | |
| WAN008D27_at | CLTA | Clathrin, light polypeptide (Lca) | Hs.522114 | 0 | 94.06307978 |
| (SEQ ID NO: 1760) | | | | | |
| WAN0088NS_at | CNOT6L | CCR4-NOT transcription complex, | Hs.591695 | 1E−113 | 97.43589744 |
| (SEQ ID NO: 2226) | | subunit 6-like | | | |
| WAN008CST_at | COPS2 | COP9 constitutive | Hs.369614 | 0 | 94.16058394 |
| (SEQ ID NO: 1711) | | photomorphogenic homolog subunit | | | |
| | | 2 (Arabidopsis) | | | |
| WAN008EEB_at | CORO1B | Coronin, actin binding protein, 1B | Hs.6191 | 2E−95 | 90.34482759 |
| (SEQ ID NO: 1762) | | | | | |
| AY011645_at | CREM | CAMP responsive element | Hs.200250 | 9E−44 | 94.02985075 |
| (SEQ ID NO: 2227) | | modulator | | | |
| WAN013I6I_at | CRYAB | Crystallin, alpha B | Hs.408767 | 1E−113 | 86.59793814 |
| (SEQ ID NO: 2228) | | | | | |
| WAN008DS3_at | CTNNBL1 | Catenin, beta like 1 | Hs.472667 | 1E−167 | 89.05660377 |
| (SEQ ID NO: 2229) | | | | | |
| WAN013I21_at | Cycs | Cytochrome c, somatic | Hs.437060 | 1E−103 | 89.21832884 |
| (SEQ ID NO: 2230) | | | | | |
| M29238_at | DDIT3 | DNA-damage-inducible transcript 3 | Hs.505777 | 1E−100 | 87.08971554 |
| (SEQ ID NO: 2030) | | | | | |
| WAN008ERF_at | DHCR7 | 7-dehydrocholesterol reductase | Hs.503134 | 2E−27 | 79.9382716 |
| (SEQ ID NO: 2231) | | | | | |
| WAN013HUM_at | EHD4 | EH-domain containing 4 | Hs.143703 | 1E−95 | 92.77108434 |
| (SEQ ID NO: 1576) | | | | | |
| WAN008E8R_at | EIF3S1 | Eukaryotic translation initiation factor | Hs.404056 | 1E−122 | 93.1372549 |
| (SEQ ID NO: 1767) | | 3, subunit 1 alpha, 35 kDa | | | |
| WAN008EJ7_at | EIF5A | Eukaryotic translation initiation factor | Hs.534314 | 0 | 98.52941176 |
| (SEQ ID NO: 2026) | | 5A | | | |
| WAN008EC0_at | EIF5B | Eukaryotic translation initiation factor | Hs.158688 | 5E−85 | 89.28571429 |
| (SEQ ID NO: 2232) | | 5B | | | |
| WAN013HYP_at | FEM1A | Fem-1 homolog a (C. elegans) | Hs.515082 | 9E−84 | 86.66666667 |
| (SEQ ID NO: 2233) | | | | | |
| Y12837_at | Fxr1h | Fragile X mental retardation gene 1, | #N/A | 0 | 96.12756264 |
| (SEQ ID NO: 2120) | | autosomal homolog | | | |
| M60973_at | GADD45A | Growth arrest and DNA-damage- | Hs.80409 | 0 | 91.57372986 |
| (SEQ ID NO: 2031) | | inducible, alpha | | | |
| WAN013I39_at | Gga2 | Golgi associated, gamma adaptin | Hs.460336 | 7E−30 | 84.45378151 |
| (SEQ ID NO: 1541) | | ear containing, ARF binding protein 2 | | | |
| WAN013I4Q_at | GLUL | Glutamate-ammonia ligase | Hs.518525 | 1E−136 | 88.44221106 |
| (SEQ ID NO: 2234) | | (glutamine synthetase) | | | |
| WAN013I0X_at | GSS | Glutathione synthetase | Hs.82327 | 1E−98 | 90.78498294 |
| (SEQ ID NO: 1581) | | | | | |
| WAN008EPH_at | GTF2H4 | General transcription factor IIH, | Hs.485070 | 1E−111 | 88.97435897 |
| (SEQ ID NO: 2235) | | polypeptide 4, 52 kDa | | | |
| WAN008E8M_at | HADHB | Hydroxyacyl-Coenzyme A | Hs.534639 | 1E−114 | 88.19095477 |
| (SEQ ID NO: 1568) | | dehydrogenase/3-ketoacyl- | | | |
| | | Coenzyme A thiolase/enoyl- | | | |
| | | Coenzyme A hydratase (trifunctional | | | |
| | | protein), beta subunit | | | |
| WAN008EKL_at | HBP1 | HMG-box transcription factor 1 | Hs.162032 | 1E−120 | 89.60784314 |
| (SEQ ID NO: 1775) | | | | | |
| WAN008CWV_at | HDGF | Hepatoma-derived growth factor | Hs.506748 | 3E−75 | 91.4893617 |
| (SEQ ID NO: 1684) | | (high-mobility group protein 1-like) | | | |
| WAN0088XH_at | HERPUD1 | Homocysteine-inducible, | Hs.146393 | 7E−79 | 87.41721854 |
| (SEQ ID NO: 1557) | | endoplasmic reticulum stress- | | | |
| | | inducible, ubiquitin-like domain | | | |
| | | member 1 | | | |
| L00180_at | Hmgcr | 3-hydroxy-3-methylglutaryl- | Hs.643495 | 5E−35 | 86.30952381 |
| (SEQ ID NO: 1509) | | Coenzyme A reductase | | | |
| WAN008D6E_x_at | HMOX2 | Heme oxygenase (decycling) 2 | Hs.284279 | 2E−32 | 94.50549451 |
| (SEQ ID NO: 2236) | | | | | |
| WAN008CLS_at | HSDL2 | Hydroxysteroid dehydrogenase like 2 | Hs.59486 | 1E−148 | 87.09090909 |
| (SEQ ID NO: 2237) | | | | | |
| WAN013I8Z_at | Hspa8 | Heat shock protein 8 | Hs.180414 | 0 | 90.56603774 |
| (SEQ ID NO: 2238) | | | | | |
| WAN008D42_at | HSPB8 | Heat shock 22 kDa protein 8 | Hs.400095 | 1E−16 | 89.02439024 |
| (SEQ ID NO: 2239) | | | | | |
| WAN013I26_at | IDH3A | Isocitrate dehydrogenase 3 (NAD+) | Hs.591110 | 0 | 89.26746167 |
| (SEQ ID NO: 2114) | | alpha | | | |
| WAN008EX2_x_at | Ifrd1 | Interferon-related developmental | Hs.7879 | 7E−39 | 90.29850746 |
| (SEQ ID NO: 1575) | | regulator 1 | | | |
| WAN013I0I_at | INSIG1 | Insulin induced gene 1 | Hs.520819 | 4E−21 | 94.20289855 |
| (SEQ ID NO: 2240) | | | | | |
| WAN0088O9_at | Itgb1 | Integrin beta 1 (fibronectin receptor | Hs.295626 | 1E−13 | 90.32258065 |
| (SEQ ID NO: 1777) | | beta) | | | |
| AF081140_at | Itgb4bp | Integrin beta 4 binding protein | Hs.632277 | 0 | 0 |
| (SEQ ID NO: 2241) | | | | | |
| X83575_at | KIF23 | Kinesin family member 23 | Hs.270845 | 1E−177 | 92.47787611 |
| (SEQ ID NO: 2007) | | | | | |
| WAN008D29_s_at | LGALS3 | Lectin, galactoside-binding, soluble, | Hs.531081 | 3E−41 | 91.8128655 |
| (SEQ ID NO: 2242) | | 3 (galectin 3) | | | |
| WAN008DBR_at | LUC7L | LUC7-like (S. cerevisiae) | Hs.16803 | 0 | 93.66197183 |
| (SEQ ID NO: 1966) | | | | | |
| WAN008ECL_at | MAN2C1 | Mannosidase, alpha, class 2C, | Hs.26232 | 1E−134 | 87.68267223 |
| (SEQ ID NO: 2243) | | member 1 | | | |
| WAN008E7Y_at | MCM7 | MCM7 minichromosome | Hs.438720 | 1E−96 | 84.53389831 |
| (SEQ ID NO: 2244) | | maintenance deficient 7 (S. cerevisiae) | | | |
| WAN013I23_at | MORF4L2 | Mortality factor 4 like 2 | Hs.326387 | 0 | 89.13043478 |
| (SEQ ID NO: 2245) | | | | | |
| WAN008CRR_at | MRPL19 | Mitochondrial ribosomal protein L19 | Hs.44024 | 1E−71 | 86.89655172 |
| (SEQ ID NO: 2246) | | | | | |
| WAN013I02_at | MRPS18A | Mitochondrial ribosomal protein | Hs.520149 | 1E−137 | 85.78767123 |
| (SEQ ID NO: 2247) | | S18A | | | |
| WAN008EV8_at | MTHFD2 | Methylenetetrahydrofolate | Hs.469030 | 7E−50 | 88.35978836 |
| (SEQ ID NO: 2189) | | dehydrogenase (NADP+ dependent) | | | |
| | | 2, methenyltetrahydrofolate | | | |
| | | cyclohydrolase | | | |
| WAN008EQD_at | Mx2 | Myxovirus (influenza virus) | Hs.926 | 2E−29 | 80.31746032 |
| (SEQ ID NO: 1894) | | resistance 2 | | | |
| WAN008BSP_x_at | NDFIP1 | Nedd4 family interacting protein 1 | Hs.9788 | 5E−33 | 92.23300971 |
| (SEQ ID NO: 2248) | | | | | |
| WAN008EDO_at | NDRG3 | NDRG family member 3 | Hs.437338 | 5E−86 | 88.00904977 |
| (SEQ ID NO: 2249) | | | | | |
| WAN013I17_at | NID1 | Nidogen 1 | Hs.356624 | 1E−101 | 83.47826087 |
| (SEQ ID NO: 1790) | | | | | |
| AF182744_at | NPC1 | Niemann-Pick disease, type C1 | Hs.464779 | 6E−83 | 85.41114058 |
| (SEQ ID NO: 2250) | | | | | |
| WAN008EK9_at | Nup160 | Nucleoporin 160 | Hs.645358 | 1E−159 | 89.2 |
| (SEQ ID NO: 2251) | | | | | |
| WAN0088ZP_at | Pawr | PRKC, apoptosis, WT1, regulator | Hs.643130 | 4E−10 | 91.52542373 |
| (SEQ ID NO: 1482) | | | | | |
| WAN008EML_at | PBK | PDZ binding kinase | Hs.104741 | 5E−52 | 89.50276243 |
| (SEQ ID NO: 1980) | | | | | |
| WAN0088X2_at | PEO1 | Progressive external | Hs.22678 | 1E−141 | 88.6509636 |
| (SEQ ID NO: 1593) | | ophthalmoplegia 1 | | | |
| WAN013I38_at | Pkm2 | Pyruvate kinase, muscle | Hs.534770 | 4E−13 | 92.85714286 |
| (SEQ ID NO: 1583) | | | | | |
| WAN0088KG_at | PPGB | Protective protein for beta- | Hs.517076 | 1E−115 | 87.58949881 |
| (SEQ ID NO: 1539) | | galactosidase (galactosialidosis) | | | |
| WAN008968_at | PPP4R1 | Protein phosphatase 4, regulatory | Hs.464595 | 1E−141 | 86.24338624 |
| (SEQ ID NO: 2252) | | subunit 1 | | | |
| WAN008D4W_at | PPT2 | Palmitoyl-protein thioesterase 2 | Hs.332138 | 6E−82 | 86.29737609 |
| (SEQ ID NO: 2079) | | | | | |
| WAN0088ZC_at | PSEN1 | Presenilin 1 (Alzheimer disease 3) | Hs.592324 | 5E−82 | 89.16083916 |
| (SEQ ID NO: 1543) | | | | | |
| WAN013HXU_at | PSMA1 | Proteasome (prosome, macropain) | Hs.102798 | 0 | 92.22011385 |
| (SEQ ID NO: 2156) | | subunit, alpha type, 1 | | | |
| WAN013HVR_at | PSMD4 | Proteasome (prosome, macropain) | Hs.505059 | 0 | 90.23090586 |
| (SEQ ID NO: 2253) | | 26S subunit, non-ATPase, 4 | | | |
| WAN008CLK_at | RAB6A | RAB6A, member RAS oncogene | Hs.12152 | 2E−55 | 88.47736626 |
| (SEQ ID NO: 1552) | | family | | | |
| WAN008CWE_at | Ralb | V-ral simian leukemia viral oncogene | Hs.469820 | 0 | 0 |
| (SEQ ID NO: 2254) | | homolog B (ras related) | | | |
| WAN008DNA_at | RBM28 | RNA binding motif protein 28 | Hs.274263 | 2E−76 | 86.62420382 |
| (SEQ ID NO: 2255) | | | | | |
| X61588_at | RHOG | Ras homolog gene family, member | Hs.501728 | 0 | 90.47619048 |
| (SEQ ID NO: 2256) | | G (rho G) | | | |
| WAN013HVB_at | RNF10 | Ring finger protein 10 | Hs.442798 | 1E−180 | 92.22462203 |
| (SEQ ID NO: 1915) | | | | | |
| WAN008CQ7_at | ROD1 | ROD1 regulator of differentiation 1 | Hs.269988 | 4E−84 | 96.31336406 |
| (SEQ ID NO: 2257) | | (S. pombe) | | | |
| WAN008EE3_at | SARS | Seryl-tRNA synthetase | Hs.531176 | 1E−116 | 90.80118694 |
| (SEQ ID NO: 1809) | | | | | |
| WAN008ENH_at | SCAMP5 | Secretory carrier membrane protein 5 | Hs.374180 | 1E−173 | 96.38888889 |
| (SEQ ID NO: 2258) | | | | | |
| WAN013I6D_at | Sdc1 | Syndecan 1 | Hs.224607 | 1E−26 | 90 |
| (SEQ ID NO: 2259) | | | | | |
| WAN008EHX_at | Setd8 | SET domain containing (lysine | Hs.572262 | 1E−141 | 86.65447898 |
| (SEQ ID NO: 1920) | | methyltransferase) 8 | | | |
| WAN008DJ9_at | SLC1A4 | Solute carrier family 1 | Hs.323878 | 1E−34 | 86.36363636 |
| (SEQ ID NO: 1565) | | (glutamate/neutral amino acid | | | |
| | | transporter), member 4 | | | |
| WAN013I1G_at | SLC25A20 | Solute carrier family 25 | Hs.13845 | 1E−137 | 86.70634921 |
| (SEQ ID NO: 1582) | | (carnitine/acylcarnitine translocase), | | | |
| | | member 20 | | | |
| WAN00895Z_at | SNAP29 | Synaptosomal-associated protein, | Hs.108002 | 2E−84 | 85.95041322 |
| (SEQ ID NO: 2260) | | 29 kDa | | | |
| WAN008EFY_at | SPG21 | Spastic paraplegia 21 (autosomal | Hs.242458 | 1E−128 | 90.45092838 |
| (SEQ ID NO: 1811) | | recessive, Mast syndrome) | | | |
| WAN008EBP_at | SQSTM1 | Sequestosome 1 | Hs.437277 | 1E−166 | 89.36170213 |
| (SEQ ID NO: 1621) | | | | | |
| WAN0088TG_at | SRP72 | Signal recognition particle 72 kDa | Hs.237825 | 1E−58 | 89.04109589 |
| (SEQ ID NO: 1540) | | | | | |
| WAN008EH6_at | STT3A | STT3, subunit of the | Hs.504237 | 0 | 93.63636364 |
| (SEQ ID NO: 2141) | | oligosaccharyltransferase complex, | | | |
| | | homolog A (S. cerevisiae) | | | |
| WAN013I0W_at | TAPBP | TAP binding protein (tapasin) | Hs.370937 | 2E−57 | 80.63314711 |
| (SEQ ID NO: 1580) | | | | | |
| WAN013HX6_at | TAX1BP1 | Tax1 (human T-cell leukemia virus | Hs.34576 | 1E−111 | 86.72985782 |
| (SEQ ID NO: 1815) | | type I) binding protein 1 | | | |
| WAN008F02_at | TFPI | Tissue factor pathway inhibitor | Hs.516578 | 3E−14 | 83.33333333 |
| (SEQ ID NO: 2191) | | (lipoprotein-associated coagulation | | | |
| | | inhibitor) | | | |
| WAN008EAE_at | Tloc1 | Translocation protein 1 | Hs.592561 | 1E−132 | 92.8358209 |
| (SEQ ID NQ: 2261) | | | | | |
| WAN008ER4_at | TMC6 | Transmembrane channel-like 6 | Hs.632227 | 3E−41 | 84.75336323 |
| (SEQ ID NO: 2262) | | | | | |
| WAN013I1C_at | Trib3 | Tribbles homolog 3 (Drosophila) | Hs.516826 | 0 | 0 |
| (SEQ ID NO: 2263) | | | | | |
| WAN008DPJ_at | Trim26 | Tripartite motif protein 26 | Hs.485041 | 0 | 0 |
| (SEQ ID NO: 2264) | | | | | |
| WAN008CVL_x_at | TUBG1 | Tubulin, gamma 1 | Hs.279669 | 8E−64 | 93.90243902 |
| (SEQ ID NO: 2265) | | | | | |
| WAN008CYV_at | TXNDC4 | Thioredoxin domain containing 4 | Hs.591899 | 4E−99 | 93.85245902 |
| (SEQ ID NO: 2266) | | (endoplasmic reticulum) | | | |
| WAN0088P2_at | UAP1 | UDP-N-acteylglucosamine | Hs.492859 | 1E−130 | 86.73267327 |
| (SEQ ID NO: 1853) | | pyrophosphorylase 1 | | | |
| WAN008E3E_at | UBE2G2 | Ubiquitin-conjugating enzyme E2G 2 | Hs.529420 | 1E−168 | 90.75630252 |
| (SEQ ID NO: 2267) | | (UBC7 homolog, yeast) | | | |
| WAN008EA0_at | VCP | Valosin-containing protein | Hs.529782 | 0 | 95.18348624 |
| (SEQ ID NO: 1487) | | | | | |
| WAN008D19_x_at | Vps35 | Vacuolar protein sorting 35 | Hs.454528 | 2E−55 | 95.52238806 |
| (SEQ ID NO: 2268) | | | | | |
| WAN013I0V_at | WBP2 | WW domain binding protein 2 | Hs.514489 | 1E−35 | 90.32258065 |
| (SEQ ID NO: 2269) | | | | | |
| WAN013I07_at | WDR43 | WD repeat domain 43 | Hs.169863 | 3E−47 | 92.02898551 |
| (SEQ ID NO: 2270) | | | | | |
| WAN008ES6_at | XAB1 | XPA binding protein 1, GTPase | Hs.18259 | 1E−128 | 88.70588235 |
| (SEQ ID NO: 2271) | | | | | |
| WAN008DQM_at | XPNPEP1 | X-prolyl aminopeptidase | Hs.390623 | 1E−147 | 88.11881188 |
| (SEQ ID NO: 2181) | | (aminopeptidase P) 1, soluble | | | |
| WAN008DNP_at | XPO1 | Exportin 1 (CRM1 homolog, yeast) | Hs.370770 | 0 | 91.08527132 |
| (SEQ ID NO: 1876) | | | | | |
| WAN0088PU_at | Ywhab | Tyrosine 3- | Hs.645387 | 1E−102 | 92.61538462 |
| (SEQ ID NO: 2128) | | monooxygenase/tryptophan 5- | | | |
| | | monooxygenase activation protein, | | | |
| | | beta polypeptide | | | |

| | | Mouse | | | |
|---|---|---|---|---|---|
| Qualifier List | % QC | Unigene ID | eValue | % ID | % QC |
| WAN008CPA_at | 61.66666667 | Mm.23896 | 1E−117 | 91.5451895 | 95.27777778 |
| (SEQ ID NO: 2214) | | | | | |
| WAN008DFA_at | 97.12230216 | Mm.182294 | 0 | 93.22344322 | 98.20143885 |
| (SEQ ID NO: 2215) | | | | | |
| WAN008DI2_at | 60.12861736 | Mm.28327 | 2E−95 | 92.20779221 | 99.03536977 |
| (SEQ ID NO: 2216) | | | | | |
| WAN008D0K_at | 96.85393258 | Mm.173758 | 1E−143 | 89.86486486 | 99.7752809 |
| (SEQ ID NO: 1877) | | | | | |
| WAN008CW0_at | 25.93516209 | Mm.27481 | 2E−37 | 90.44117647 | 33.91521197 |
| (SEQ ID NO: 2217) | | | | | |
| WAN013I9E_at | 43.00791557 | Mm.5378 | 0 | 89.56989247 | 81.79419525 |
| (SEQ ID NO: 2218) | | | | | |
| WAN0088LT_at | 76.5917603 | Mm.290578 | 1E−166 | 91.52892562 | 90.63670412 |
| (SEQ ID NO: 2219) | | | | | |
| WAN008DGD_at | 0 | Mm.19133 | 6E−69 | 93.0875576 | 44.46721311 |
| (SEQ ID NO: 1564) | | | | | |
| WAN013I8H_x_at | 83.53982301 | Mm.277585 | 1E−167 | 87.78761062 | 100 |
| (SEQ ID NO: 1548) | | | | | |
| WAN0088T2_at | 97.83001808 | Mm.641 | 0 | 91.71374765 | 96.02169982 |
| (SEQ ID NO: 1592) | | | | | |
| WAN008DS1_at | 82.24852071 | Mm.248906 | 1E−170 | 91.32149901 | 100 |
| (SEQ ID NO: 2220) | | | | | |
| WAN0088OB_at | 99.44444444 | Mm.38870 | 1E−142 | 92.77777778 | 100 |
| (SEQ ID NO: 2221) | | | | | |
| WAN013HXN_at | 33.80035026 | Mm.4215 | 0 | 90.03831418 | 91.41856392 |
| (SEQ ID NO: 2222) | | | | | |
| WAN008DU8_at | 75.16198704 | Mm.221271 | 1E−162 | 95.23809524 | 77.10583153 |
| (SEQ ID NO: 2223) | | | | | |
| WAN013I8J_at | 44.39215686 | Mm.22592 | 0 | 90.70945946 | 46.43137255 |
| (SEQ ID NO: 2001) | | | | | |
| WAN0088YD_at | 90.4676259 | Mm.426068 | 0.00005 | 96.66666667 | 5.395683453 |
| (SEQ ID NO: 2224) | | | | | |
| U42430_at | 34.25605536 | Mm.18628 | 2E−57 | 88.0733945 | 37.71626298 |
| (SEQ ID NO: 1673) | | | | | |
| WAN013HYB_at | 98.9010989 | Mm.29524 | 1E−130 | 89.28571429 | 100 |
| (SEQ ID NO: 2225) | | | | | |
| WAN008D27_at | 99.26335175 | Mm.298875 | 0 | 94.83394834 | 99.81583794 |
| (SEQ ID NO: 1760) | | | | | |
| WAN0088NS_at | 50.86956522 | Mm.28374 | 1E−106 | 98.13953488 | 46.73913043 |
| (SEQ ID NO: 2226) | | | | | |
| WAN008CST_at | 100 | Mm.3596 | 0 | 96.89781022 | 100 |
| (SEQ ID NO: 1711) | | | | | |
| WAN008EEB_at | 55.98455598 | Mm.276859 | 1E−128 | 94.61279461 | 57.33590734 |
| (SEQ ID NO: 1762) | | | | | |
| AY011645_at | 37.4301676 | Mm.5244 | 1E−149 | 93.82022472 | 99.44134078 |
| (SEQ ID NO: 2227) | | | | | |
| WAN013I6I_at | 97.97979798 | Mm.178 | 1E−124 | 86.80203046 | 99.49494949 |
| (SEQ ID NO: 2228) | | | | | |
| WAN008DS3_at | 99.06542056 | Mm.45193 | 0 | 90.8411215 | 100 |
| (SEQ ID NO: 2229) | | | | | |
| WAN013I21_at | 73.3201581 | Mm.35389 | 0 | 95.86956522 | 90.90909091 |
| (SEQ ID NO: 2230) | | | | | |
| M29238_at | 76.80672269 | Mm.110220 | 1E−119 | 89.26829268 | 68.90756303 |
| (SEQ ID NO: 2030) | | | | | |
| WAN008ERF_at | 70.74235808 | Mm.249342 | 1E−147 | 90.02217295 | 98.47161572 |
| (SEQ ID NO: 2231) | | | | | |
| WAN013HUM_at | 59.00473934 | Mm.132226 | 1E−125 | 88.57142857 | 99.52606635 |
| (SEQ ID NO: 1576) | | | | | |
| WAN008E8R_at | 71.1627907 | Mm.27695 | 1E−140 | 95.46925566 | 71.86046512 |
| (SEQ ID NO: 1767) | | | | | |
| WAN008EJ7_at | 100 | Mm.196607 | 0 | 97.54901961 | 100 |
| (SEQ ID NO: 2026) | | | | | |
| WAN008EC0_at | 97.56097561 | Mm.260943 | 1E−100 | 91.45907473 | 97.90940767 |
| (SEQ ID NO: 2232) | | | | | |
| WAN013HYP_at | 58.61456483 | Mm.290813 | 1E−107 | 89.28571429 | 59.68028419 |
| (SEQ ID NO: 2233) | | | | | |
| Y12837_at | 100 | Mm.259021 | 0 | 97.72209567 | 100 |
| (SEQ ID NO: 2120) | | | | | |
| M60973_at | 76.34815516 | Mm.389750 | 1E−170 | 90.57692308 | 49.19583728 |
| (SEQ ID NO: 2031) | | | | | |
| WAN013I39_at | 46.66666667 | Mm.29619 | 1E−147 | 93.33333333 | 79.41176471 |
| (SEQ ID NO: 1541) | | | | | |
| WAN013I4Q_at | 74.39252336 | Mm.210745 | 1E−135 | 88.11881188 | 75.51401869 |
| (SEQ ID NO: 2234) | | | | | |
| WAN013I0X_at | 56.1302682 | Mm.252316 | 1E−129 | 95.18900344 | 55.74712644 |
| (SEQ ID NO: 1581) | | | | | |
| WAN008EPH_at | 87.64044944 | Mm.10182 | 1E−148 | 91.87817259 | 88.53932584 |
| (SEQ ID NO: 2235) | | | | | |
| WAN008E8M_at | 85.77586207 | Mm.291463 | 1E−160 | 91.03139013 | 96.12068966 |
| (SEQ ID NO: 1568) | | | | | |
| WAN008EKL_at | 98.45559846 | Mm.390461 | 0 | 91.6827853 | 99.80694981 |
| (SEQ ID NO: 1775) | | | | | |
| WAN008CWV_at | 43.04029304 | Mm.292208 | 2E−75 | 91.4893617 | 43.04029304 |
| (SEQ ID NO: 1684) | | | | | |
| WAN0088XH_at | 68.48072562 | Mm.29151 | 1E−151 | 91.46341463 | 92.97052154 |
| (SEQ ID NO: 1557) | | | | | |
| L00180_at | 68.01619433 | Mm.316652 | 1E−49 | 90.24390244 | 66.39676113 |
| (SEQ ID NO: 1509) | | | | | |
| WAN008D6E_x_at | 28.4375 | Mm.272866 | 2E−37 | 95.78947368 | 29.6875 |
| (SEQ ID NO: 2236) | | | | | |
| WAN008CLS_at | 95.65217391 | Mm.272905 | 0 | 93.01919721 | 99.65217391 |
| (SEQ ID NO: 2237) | | | | | |
| WAN013I8Z_at | 69.19060052 | Mm.290774 | 0 | 93.73368146 | 100 |
| (SEQ ID NO: 2238) | | | | | |
| WAN008D42_at | 15.3271028 | Mm.21549 | 3E−31 | 90.90909091 | 20.56074766 |
| (SEQ ID NO: 2239) | | | | | |
| WAN013I26_at | 98.16053512 | Mm.279195 | 0 | 94.06779661 | 98.66220736 |
| (SEQ ID NO: 2114) | | | | | |
| WAN008EX2_x_at | 100 | Mm.168 | 5E−63 | 97.76119403 | 100 |
| (SEQ ID NO: 1575) | | | | | |
| WAN013I0I_at | 12.94559099 | Mm.30221 | 3E−44 | 86.53846154 | 39.02439024 |
| (SEQ ID NO: 2240) | | | | | |
| WAN0088O9_at | 16.4893617 | Mm.263396 | 4E−55 | 90.49773756 | 39.18439716 |
| (SEQ ID NO: 1777) | | | | | |
| AF081140_at | 0 | Mm.271674 | 5E−56 | 92.02453988 | 52.24358974 |
| (SEQ ID NO: 2241) | | | | | |
| X83575_at | 37.07957342 | Mm.259374 | 0 | 91.99372057 | 52.2559475 |
| (SEQ ID NO: 2007) | | | | | |
| WAN008D29_s_at | 31.78438662 | Mm.248615 | 5E−79 | 88.48484848 | 61.33828996 |
| (SEQ ID NO: 2242) | | | | | |
| WAN008DBR_at | 100 | Mm.386921 | 0 | 95.07042254 | 100 |
| (SEQ ID NO: 1966) | | | | | |
| WAN008ECL_at | 96.96356275 | Mm.30110 | 1E−119 | 93.02325581 | 60.93117409 |
| (SEQ ID NO: 2243) | | | | | |
| WAN008E7Y_at | 88.38951311 | Mm.241714 | 1E−171 | 90.98532495 | 89.3258427 |
| (SEQ ID NO: 2244) | | | | | |
| WAN013I23_at | 96.61610268 | Mm.27218 | 0 | 92.6487748 | 100 |
| (SEQ ID NO: 2245) | | | | | |
| WAN008CRR_at | 58 | Mm.276293 | 1E−136 | 87.34939759 | 99.6 |
| (SEQ ID NO: 2246) | | | | | |
| WAN013I02_at | 89.02439024 | Mm.287443 | 0 | 90.92465753 | 89.02439024 |
| (SEQ ID NO: 2247) | | | | | |
| WAN008EV8_at | 68.23104693 | Mm.443 | 4E−84 | 91.05691057 | 88.80866426 |
| (SEQ ID NO: 2189) | | | | | |
| WAN008EQD_at | 75 | Mm.14157 | 2E−99 | 85.95238095 | 100 |
| (SEQ ID NO: 1894) | | | | | |
| WAN008BSP_x_at | 93.63636364 | Mm.102496 | 1E−44 | 95.45454545 | 100 |
| (SEQ ID NO: 2248) | | | | | |
| WAN008EDO_at | 92.85714286 | Mm.279256 | 3E−92 | 93.41563786 | 51.05042017 |
| (SEQ ID NO: 2249) | | | | | |
| WAN013I17_at | 83.03249097 | Mm.4691 | 9E−99 | 91.66666667 | 45.48736462 |
| (SEQ ID NO: 1790) | | | | | |
| AF182744_at | 70.20484171 | Mm.3484 | 1E−167 | 92.13483146 | 82.86778399 |
| (SEQ ID NO: 2250) | | | | | |
| WAN008EK9_at | 99.60159363 | Mm.24532 | 0 | 94.36619718 | 99.00398406 |
| (SEQ ID NO: 2251) | | | | | |
| WAN0088ZP_at | 11.11111111 | Mm.391419 | 8E−53 | 91.62561576 | 38.22975518 |
| (SEQ ID NO: 1482) | | | | | |
| WAN008EML_at | 39.09287257 | Mm.24337 | 3E−80 | 89.7810219 | 59.17926566 |
| (SEQ ID NO: 1980) | | | | | |
| WAN0088X2_at | 94.53441296 | Mm.105585 | 7E−78 | 90.6779661 | 47.77327935 |
| (SEQ ID NO: 1593) | | | | | |
| WAN013I38_at | 10.18181818 | Mm.326167 | 0 | 92.42718447 | 93.63636364 |
| (SEQ ID NO: 1583) | | | | | |
| WAN0088KG_at | 72.86956522 | Mm.359633 | 1E−149 | 90.93078759 | 72.86956522 |
| (SEQ ID NO: 1539) | | | | | |
| WAN008968_at | 99.47368421 | Mm.48686 | 0 | 91.34438306 | 95.26315789 |
| (SEQ ID NO: 2252) | | | | | |
| WAN008D4W_at | 97.44318182 | Mm.373627 | 1E−96 | 89.38906752 | 88.35227273 |
| (SEQ ID NO: 2079) | | | | | |
| WAN0088ZC_at | 86.14457831 | Mm.998 | 4E−78 | 88.1533101 | 86.44578313 |
| (SEQ ID NO: 1543) | | | | | |
| WAN013HXU_at | 100 | Mm.121265 | 0 | 94.84732824 | 99.43074004 |
| (SEQ ID NO: 2156) | | | | | |
| WAN013HVR_at | 100 | Mm.2261 | 0 | 94.12811388 | 99.82238011 |
| (SEQ ID NO: 2253) | | | | | |
| WAN008CLK_at | 48.21428571 | #N/A | 1E−161 | 92.07317073 | 97.61904762 |
| (SEQ ID NO: 1552) | | | | | |
| WAN008CWE_at | 0 | Mm.27832 | 2E−34 | 90.24390244 | 30.37037037 |
| (SEQ ID NO: 2254) | | | | | |
| WAN008DNA_at | 55.9714795 | Mm.40802 | 1E−172 | 90.38112523 | 98.21746881 |
| (SEQ ID NO: 2255) | | | | | |
| X61588_at | 67.5 | Mm.259795 | 0 | 93.49693252 | 72.76785714 |
| (SEQ ID NO: 2256) | | | | | |
| WAN013HVB_at | 80.66202091 | Mm.30051 | 1E−158 | 89.56158664 | 83.44947735 |
| (SEQ ID NO: 1915) | | | | | |
| WAN008CQ7_at | 39.74358974 | Mm.331640 | 1E−121 | 97.31800766 | 47.8021978 |
| (SEQ ID NO: 2257) | | | | | |
| WAN008EE3_at | 100 | Mm.28688 | 1E−136 | 93.17507418 | 100 |
| (SEQ ID NO: 1809) | | | | | |
| WAN008ENH_at | 79.47019868 | Mm.102278 | 0 | 95.58498896 | 100 |
| (SEQ ID NO: 2258) | | | | | |
| WAN013I6D_at | 9.615384615 | Mm.2580 | 0 | 88.17073171 | 60.65088757 |
| (SEQ ID NO: 2259) | | | | | |
| WAN008EHX_at | 100 | Mm.137966 | 0 | 89.76234004 | 100 |
| (SEQ ID NO: 1920) | | | | | |
| WAN008DJ9_at | 39.46188341 | Mm.6379 | 1E−119 | 88.36633663 | 90.58295964 |
| (SEQ ID NO: 1565) | | | | | |
| WAN013I1G_at | 87.65217391 | Mm.29666 | 0 | 92.35412475 | 86.43478261 |
| (SEQ ID NO: 1582) | | | | | |
| WAN00895Z_at | 100 | Mm.271992 | 3E−88 | 87.87878788 | 100 |
| (SEQ ID NO: 2260) | | | | | |
| WAN008EFY_at | 71.94656489 | Mm.272475 | 1E−136 | 91.44385027 | 71.3740458 |
| (SEQ ID NO: 1811) | | | | | |
| WAN008EBP_at | 92.65232975 | Mm.40828 | 0 | 93.40659341 | 97.84946237 |
| (SEQ ID NO: 1621) | | | | | |
| WAN0088TG_at | 50.81206497 | Mm.296976 | 1E−119 | 92.40121581 | 76.33410673 |
| (SEQ ID NO: 1540) | | | | | |
| WAN008EH6_at | 97.86476868 | Mm.2863 | 0 | 95.27272727 | 97.86476868 |
| (SEQ ID NO: 2141) | | | | | |
| WAN013I0W_at | 93.22916667 | Mm.154457 | 1E−149 | 86.8852459 | 95.3125 |
| (SEQ ID NO: 1580) | | | | | |
| WAN013HX6_at | 41.49459194 | Mm.431979 | 1E−124 | 89.42065491 | 39.03638151 |
| (SEQ ID NO: 1815) | | | | | |
| WAN008F02_at | 21.79930796 | Mm.124316 | 3E−83 | 85.5227882 | 64.53287197 |
| (SEQ ID NO: 2191) | | | | | |
| WAN008EAE_at | 100 | Mm.26017 | 1E−158 | 96.11940299 | 100 |
| (SEQ ID NQ: 2261) | | | | | |
| WAN008ER4_at | 42.31499051 | Mm.286963 | 1E−94 | 87.08791209 | 69.07020873 |
| (SEQ ID NO: 2262) | | | | | |
| WAN013I1C_at | 0 | Mm.276018 | 5E−22 | 92.20779221 | 13.02876481 |
| (SEQ ID NO: 2263) | | | | | |
| WAN008DPJ_at | 0 | Mm.34587 | 7E−10 | 89.18918919 | 14.82965932 |
| (SEQ ID NO: 2264) | | | | | |
| WAN008CVL_x_at | 96.47058824 | Mm.142348 | 2E−75 | 96.40718563 | 98.23529412 |
| (SEQ ID NO: 2265) | | | | | |
| WAN008CYV_at | 48.70259481 | Mm.317701 | 1E−142 | 95.76547231 | 61.27744511 |
| (SEQ ID NO: 2266) | | | | | |
| WAN0088P2_at | 91.98542805 | Mm.27969 | 1E−177 | 90.01883239 | 96.72131148 |
| (SEQ ID NO: 1853) | | | | | |
| WAN008E3E_at | 94.07114625 | Mm.307906 | 0 | 95.20958084 | 99.01185771 |
| (SEQ ID NO: 2267) | | | | | |
| WAN008EA0_at | 78.98550725 | Mm.262053 | 0 | 95.47101449 | 100 |
| (SEQ ID NO: 1487) | | | | | |
| WAN008D19_x_at | 86.4516129 | Mm.296520 | 1E−64 | 97.16312057 | 90.96774194 |
| (SEQ ID NO: 2268) | | | | | |
| WAN013I0V_at | 49.20634921 | Mm.284792 | 3E−56 | 87.55364807 | 92.46031746 |
| (SEQ ID NO: 2269) | | | | | |
| WAN013I07_at | 25.32110092 | Mm.257762 | 1E−63 | 90 | 38.53211009 |
| (SEQ ID NO: 2270) | | | | | |
| WAN008ES6_at | 98.60788863 | Mm.348649 | 1E−168 | 92.6713948 | 98.14385151 |
| (SEQ ID NO: 2271) | | | | | |
| WAN008DQM_at | 99.60552268 | Mm.99776 | 0 | 92.50493097 | 100 |
| (SEQ ID NO: 2181) | | | | | |
| WAN008DNP_at | 98.47328244 | Mm.217547 | 0 | 94.84732824 | 100 |
| (SEQ ID NO: 1876) | | | | | |
| WAN0088PU_at | 62.74131274 | Mm.34319 | 0 | 92.81553398 | 99.42084942 |
| (SEQ ID NO: 2128) | | | | | |

[0178] TABLE 29
LLP2 + 4 Test-specific 1.2F UP

| | | | Human | | |
|---|---|---|---|---|---|
| | | | Unigene | | |
| Qualifier List | Symbol | Title | ID | eValue | % ID |
| WAN013I76_at | ERBB2 | V-erb-b2 erythroblastic leukemia viral | Hs.446352 | 7E−61 | 87.23404255 |
| (SEQ ID | | oncogene homolog 2, | | | |
| NO: 2272) | | neuro/glioblastoma derived | | | |
| | | oncogene homolog (avian) | | | |
| WAN008BXV_at | Fbxl5 | F-box and leucine-rich repeat protein 5 | Hs.645220 | 4E−99 | 94.82758621 |
| (SEQ ID | | | | | |
| NO: 2273) | | | | | |
| WAN013I4Q_at | GLUL | Glutamate-ammonia ligase | Hs.518525 | 1E−136 | 88.44221106 |
| (SEQ ID | | (glutamine synthetase) | | | |
| NO: 2234) | | | | | |
| WAN008EMJ_at | GPC6 | Glypican 6 | Hs.444329 | 7E−64 | 92.55319149 |
| (SEQ ID | | | | | |
| NO: 1721) | | | | | |
| U73375_at | LGALS3BP | Lectin, galactoside-binding, soluble, | Hs.514535 | 5E−31 | 82.88288288 |
| (SEQ ID | | 3 binding protein | | | |
| NO: 2274) | | | | | |
| WAN013I2D_at | RAP2C | RAP2C, member of RAS oncogene | Hs.119889 | 4E−77 | 91.18942731 |
| (SEQ ID | | family | | | |
| NO: 2275) | | | | | |
| WAN0088ZJ_at | Slc4a2 | Solute carrier family 4 (anion | #N/A | 1E−162 | 88.57677903 |
| (SEQ ID | | exchanger), member 2 | | | |
| NO: 2075) | | | | | |

| | | Mouse | | | |
|---|---|---|---|---|---|
| Qualifier List | % QC | Unigene ID | eValue | % ID | % QC |
| WAN013I76_at | 51.55393053 | Mm.290822 | 5E−76 | 88.54166667 | 52.65082267 |
| (SEQ ID | | | | | |
| NO: 2272) | | | | | |
| WAN008BXV_at | 43.04267161 | Mm.25794 | 0 | 94.37148218 | 98.88682746 |
| (SEQ ID | | | | | |
| NO: 2273) | | | | | |
| WAN013I4Q_at | 74.39252336 | Mm.210745 | 1E−135 | 88.11881188 | 75.51401869 |
| (SEQ ID | | | | | |
| NO: 2234) | | | | | |
| WAN008EMJ_at | 37.4501992 | Mm.234129 | 3E−58 | 90.37433155 | 37.25099602 |
| (SEQ ID | | | | | |
| NO: 1721) | | | | | |
| U73375_at | 38.81118881 | Mm.3152 | 2E−84 | 85.48812665 | 66.25874126 |
| (SEQ ID | | | | | |
| NO: 2274) | | | | | |
| WAN013I2D_at | 56.75 | Mm.43152 | 2E−86 | 93.24324324 | 55.5 |
| (SEQ ID | | | | | |
| NO: 2275) | | | | | |
| WAN0088ZJ_at | 100 | Mm.4580 | 0 | 93.79699248 | 99.62546816 |
| (SEQ ID | | | | | |
| NO: 2075) | | | | | |

[0179] TABLE 30
LLP2 + 4 Test-specific 1.2F DOWN (39genes)

| | | | Human | | |
|---|---|---|---|---|---|
| Qualifier List | Symbol | Title | Unigene ID | eValue | % ID |
| WAN013I6P_f_at | Abcb1a | ATP-binding cassette, sub-family B | #N/A | 6E−40 | 90.90909091 |
| (SEQ ID NO: 1658) | | (MDR/TAP), member 1A | | | |
| WAN008CRT_at | ALG14 | Asparagine-linked glycosylation 14 | Hs.408927 | 4E−47 | 88.39779006 |
| (SEQ ID NO: 1954) | | homolog (yeast) | | | |
| M80243-rc_at | BIRC5 | Baculoviral IAP repeat-containing 5 | Hs.514527 | 4E−38 | 92.37288136 |
| (SEQ ID NO: 1943) | | (survivin) | | | |
| WAN0088K1_at | BRD2 | Bromodomain containing 2 | Hs.75243 | 1E−163 | 88.93129771 |
| (SEQ ID NO: 2276) | | | | | |
| WAN013I8J_at | CCNB2 | Cyclin B2 | Hs.194698 | 1E−173 | 86.92579505 |
| (SEQ ID NO: 2001) | | | | | |
| WAN008CVX_at | CDC20 | CDC20 cell division cycle 20 | Hs.524947 | 1E−169 | 90.66390041 |
| (SEQ ID NO: 1958) | | homolog (S. cerevisiae) | | | |
| WAN008DGK_at | CHAF1A | Chromatin assembly factor 1, | Hs.79018 | 1E−83 | 91.32231405 |
| (SEQ ID NO: 1967) | | subunit A (p150) | | | |
| WAN0088OE_at | Crk | V-crk sarcoma virus CT10 | Hs.638121 | 1E−161 | 94.35483871 |
| (SEQ ID NO: 2176) | | oncogene homolog (avian) | | | |
| WAN008E4R_at | DHX16 | DEAH (Asp-Glu-Ala-His) box | Hs.485060 | 4E−84 | 91.63179916 |
| (SEQ ID NO: 2277) | | polypeptide 16 | | | |
| WAN008DYW_at | FARSLA | Phenylalanine-tRNA synthetase- | Hs.23111 | 1E−126 | 86.45418327 |
| (SEQ ID NO: 2278) | | like, alpha subunit | | | |
| WAN008E40_at | FEN1 | Flap structure-specific | Hs.409065 | 1E−121 | 91.22807018 |
| (SEQ ID NO: 2279) | | endonuclease 1 | | | |
| WAN013HYG_x_at | Grb2 | Growth factor receptor bound | Hs.444356 | 4E−47 | 80.13937282 |
| (SEQ ID NO: 2280) | | protein 2 | | | |
| WAN008EVU_f_at | HNRPK | Heterogeneous nuclear | Hs.522257 | 1E−128 | 92.94478528 |
| (SEQ ID NO: 1887) | | ribonucleoprotein K | | | |
| WAN008EX2_x_at | Ifrd1 | Interferon-related developmental | Hs.7879 | 7E−39 | 90.29850746 |
| (SEQ ID NO: 1575) | | regulator 1 | | | |
| WAN008E3O_at | LINCR | Likely ortholog of mouse lung- | Hs.149219 | 3E−19 | 84.61538462 |
| (SEQ ID NO: 1973) | | inducible Neutralized-related | | | |
| | | C3HC4 RING domain protein | | | |
| WAN008CVC_at | Mm.387215 | CDNA, clone:Y0G0110B16, | #N/A | 1E−119 | 97.95081967 |
| (SEQ ID NO: 2281) | | strand:plus, | | | |
| | | reference:ENSEMBL:Mouse- | | | |
| | | Transcript- | | | |
| | | ENST:ENSMUST00000058619, | | | |
| | | based on BLAT search | | | |
| WAN0088XN_at | MTHFD1L | Methylenetetrahydrofolate | Hs.591343 | 1E−99 | 90.57239057 |
| (SEQ ID NO: 2282) | | dehydrogenase (NADP+ | | | |
| | | dependent) 1-like | | | |
| WAN008EV8_at | MTHFD2 | Methylenetetrahydrofolate | Hs.469030 | 7E−50 | 88.35978836 |
| (SEQ ID NO: 2189) | | dehydrogenase (NADP+ | | | |
| | | dependent) 2, | | | |
| | | methenyltetrahydrofolate | | | |
| | | cyclohydrolase | | | |
| WAN008EOB_at | NOL1 | Nucleolar protein 1, 120 kDa | Hs.534334 | 8E−48 | 89.80582524 |
| (SEQ ID NO: 1629) | | | | | |
| WAN008CTA_at | NOLC1 | Nucleolar and coiled-body | Hs.523238 | 1E−101 | 89.12386707 |
| (SEQ ID NO: 1957) | | phosphoprotein 1 | | | |
| WAN013I8D_at | PARP1 | Poly (ADP-ribose) polymerase | Hs.177766 | 2E−43 | 85.57692308 |
| (SEQ ID NO: 2000) | | family, member 1 | | | |
| WAN008DUC_at | PHF14 | PHD finger protein 14 | Hs.159918 | 8E−86 | 94.63414634 |
| (SEQ ID NO: 1795) | | | | | |
| WAN008EBY_at | PLCG1 | Phospholipase C, gamma 1 | Hs.268177 | 1E−175 | 89.63636364 |
| (SEQ ID NO: 2283) | | | | | |
| WAN008EHF_at | POFUT2 | Protein O-fucosyltransferase 2 | Hs.592164 | 5E−77 | 85.84070796 |
| (SEQ ID NO: 2284) | | | | | |
| WAN013HY0_at | PRPF19 | PRP19/PSO4 pre-mRNA | Hs.502705 | 0 | 89.25318761 |
| (SEQ ID NO: 2173) | | processing factor 19 homolog (S. cerevisiae) | | | |
| WAN008DQG_at | PRPF3 | PRP3 pre-mRNA processing factor | Hs.11776 | 1E−114 | 92.45901639 |
| (SEQ ID NO: 2285) | | 3 homolog (S. cerevisiae) | | | |
| WAN013I0A_x_at | PRPF38B | PRP38 pre-mRNA processing | Hs.342307 | 4E−84 | 83.39694656 |
| (SEQ ID NO: 2113) | | factor 38 (yeast) domain containing B | | | |
| WAN008E7N_at | RBBP4 | Retinoblastoma binding protein 4 | Hs.16003 | 1E−88 | 89.51048951 |
| (SEQ ID NO: 2286) | | | | | |
| WAN008EQE_x_at | RNPEP | Arginyl aminopeptidase | Hs.497391 | 6E−22 | 85.38461538 |
| (SEQ ID NO: 2287) | | (aminopeptidase B) | | | |
| WAN0088NR_at | SF3B3 | Splicing factor 3b, subunit 3, | Hs.514435 | 1E−131 | 92.39766082 |
| (SEQ ID NO: 2288) | | 130 kDa | | | |
| WAN008EPC_at | SHMT2 | Serine hydroxymethyltransferase 2 | Hs.75069 | 1E−143 | 90.43062201 |
| (SEQ ID NO: 2289) | | (mitochondrial) | | | |
| WAN008E5L_at | SLC1A5 | Solute carrier family 1 (neutral | Hs.631582 | 8E−42 | 84.16666667 |
| (SEQ ID NO: 1619) | | amino acid transporter), member 5 | | | |
| WAN0088S8_at | SLC29A1 | Solute carrier family 29 (nucleoside | Hs.25450 | 3E−35 | 81.3559322 |
| (SEQ ID NO: 1591) | | transporters), member 1 | | | |
| WAN008DCP_at | TBC1D10A | TBC1 domain family, member 10A | Hs.444950 | 0 | 90.84507042 |
| (SEQ ID NO: 2100) | | | | | |
| WAN0088TW_at | TCEB3 | Transcription elongation factor B | Hs.584806 | 1E−173 | 89.36567164 |
| (SEQ ID NO: 1745) | | (SIII), polypeptide 3 (110 kDa, | | | |
| | | elongin A) | | | |
| WAN008CS0_at | TMEM103 | Transmembrane protein 103 | Hs.311100 | 1E−96 | 84.22131148 |
| (SEQ ID NO: 2290) | | | | | |
| WAN008ES6_at | XAB1 | XPA binding protein 1, GTPase | Hs.18259 | 1E−128 | 88.70588235 |
| (SEQ ID NO: 2271) | | | | | |
| WAN008EGH_at | XPOT | Exportin, tRNA (nuclear export | Hs.85951 | 1E−145 | 87.2659176 |
| (SEQ ID NO: 2291) | | receptor for tRNAs) | | | |
| WAN008906_at | Zfp259 | Zinc finger protein 259 | #N/A | 1E−162 | 90.13539652 |
| (SEQ ID NO: 1833) | | | | | |

| | | Mouse | | | |
|---|---|---|---|---|---|
| Qualifier List | % QC | Unigene ID | eValue | % ID | % QC |
| WAN013I6P_f_at | 80 | Mm.207354 | 1E−51 | 93.29268293 | 99.39393939 |
| (SEQ ID NO: 1658) | | | | | |
| WAN008CRT_at | 32.43727599 | Mm.269881 | 5E−51 | 88.77005348 | 33.5125448 |
| (SEQ ID NO: 1954) | | | | | |
| M80243-rc_at | 20.34482759 | Mm.8552 | 1E−36 | 93.45794393 | 18.44827586 |
| (SEQ ID NO: 1943) | | | | | |
| WAN0088K1_at | 95.09981851 | Mm.3444 | 0 | 90.92558984 | 100 |
| (SEQ ID NO: 2276) | | | | | |
| WAN013I8J_at | 44.39215686 | Mm.22592 | 0 | 90.70945946 | 46.43137255 |
| (SEQ ID NO: 2001) | | | | | |
| WAN008CVX_at | 85.1590106 | Mm.289747 | 0 | 92.30769231 | 87.27915194 |
| (SEQ ID NO: 1958) | | | | | |
| WAN008DGK_at | 57.89473684 | Mm.391010 | 1E−101 | 90.84745763 | 70.57416268 |
| (SEQ ID NO: 1967) | | | | | |
| WAN0088OE_at | 77.01863354 | Mm.280125 | 0 | 97.04301075 | 77.01863354 |
| (SEQ ID NO: 2176) | | | | | |
| WAN008E4R_at | 44.25925926 | Mm.390986 | 3E−80 | 90.83333333 | 44.44444444 |
| (SEQ ID NO: 2277) | | | | | |
| WAN008DYW_at | 90.45045045 | Mm.292517 | 0 | 94.22718808 | 96.75675676 |
| (SEQ ID NO: 2278) | | | | | |
| WAN008E40_at | 61.40035907 | Mm.2952 | 1E−136 | 92.77456647 | 62.11849192 |
| (SEQ ID NO: 2279) | | | | | |
| WAN013HYG_x_at | 86.18618619 | Mm.383426 | 1E−89 | 85.07936508 | 94.59459459 |
| (SEQ ID NO: 2280) | | | | | |
| WAN008EVU_f_at | 97.60479042 | Mm.142872 | 1E−133 | 93.11377246 | 100 |
| (SEQ ID NO: 1887) | | | | | |
| WAN008EX2_x_at | 100 | Mm.168 | 5E−63 | 97.76119403 | 100 |
| (SEQ ID NO: 1575) | | | | | |
| WAN008E3O_at | 38.01169591 | Mm.389110 | 3E−76 | 85.3372434 | 99.70760234 |
| (SEQ ID NO: 1973) | | | | | |
| WAN008CVC_at | 100 | Mm.387215 | 1E−117 | 97.54098361 | 100 |
| (SEQ ID NO: 2281) | | | | | |
| WAN0088XN_at | 54.59558824 | Mm.184752 | 1E−126 | 94.27609428 | 54.59558824 |
| (SEQ ID NO: 2282) | | | | | |
| WAN008EV8_at | 68.23104693 | Mm.443 | 4E−84 | 91.05691057 | 88.80866426 |
| (SEQ ID NO: 2189) | | | | | |
| WAN008EOB_at | 42.4742268 | Mm.29203 | 1E−120 | 87.24832215 | 92.16494845 |
| (SEQ ID NO: 1629) | | | | | |
| WAN008CTA_at | 59.63963964 | Mm.402190 | 3E−28 | 89.90825688 | 19.63963964 |
| (SEQ ID NO: 1957) | | | | | |
| WAN013I8D_at | 35.01683502 | Mm.277779 | 1E−102 | 87.78054863 | 67.50841751 |
| (SEQ ID NO: 2000) | | | | | |
| WAN008DUC_at | 99.51456311 | Mm.212411 | 4E−74 | 92.19512195 | 99.51456311 |
| (SEQ ID NO: 1795) | | | | | |
| WAN008EBY_at | 99.45750452 | Mm.44463 | 0 | 92.58589512 | 100 |
| (SEQ ID NO: 2283) | | | | | |
| WAN008EHF_at | 61.30198915 | Mm.203556 | 1E−179 | 94.58128079 | 73.41772152 |
| (SEQ ID NO: 2284) | | | | | |
| WAN013HY0_at | 100 | Mm.358657 | 0 | 93.26047359 | 100 |
| (SEQ ID NO: 2173) | | | | | |
| WAN008DQG_at | 99.02597403 | Mm.279872 | 1E−121 | 93.18181818 | 100 |
| (SEQ ID NO: 2285) | | | | | |
| WAN013I0A_x_at | 99.05482042 | Mm.51049 | 1E−173 | 89.69465649 | 99.05482042 |
| (SEQ ID NO: 2113) | | | | | |
| WAN008E7N_at | 94.38943894 | Mm.12145 | 1E−113 | 92.07920792 | 100 |
| (SEQ ID NO: 2286) | | | | | |
| WAN008EQE_x_at | 59.09090909 | Mm.291048 | 7E−45 | 85.45454545 | 100 |
| (SEQ ID NO: 2287) | | | | | |
| WAN0088NR_at | 81.04265403 | Mm.236123 | 1E−151 | 94.9704142 | 80.09478673 |
| (SEQ ID NO: 2288) | | | | | |
| WAN008EPC_at | 99.0521327 | Mm.29890 | 1E−142 | 90.68627451 | 96.68246445 |
| (SEQ ID NO: 2289) | | | | | |
| WAN008E5L_at | 45.62737643 | Mm.1056 | 1E−115 | 87.67123288 | 83.26996198 |
| (SEQ ID NO: 1619) | | | | | |
| WAN0088S8_at | 76.12903226 | Mm.29744 | 5E−97 | 86.09756098 | 88.17204301 |
| (SEQ ID NO: 1591) | | | | | |
| WAN008DCP_at | 100 | Mm.28140 | 0 | 95.42253521 | 100 |
| (SEQ ID NO: 2100) | | | | | |
| WAN0088TW_at | 98.52941176 | Mm.27663 | 0 | 93.09701493 | 98.52941176 |
| (SEQ ID NO: 1745) | | | | | |
| WAN008CS0_at | 88.4057971 | Mm.374250 | 1E−152 | 87.96992481 | 96.37681159 |
| (SEQ ID NO: 2290) | | | | | |
| WAN008ES6_at | 98.60788863 | Mm.348649 | 1E−168 | 92.6713948 | 98.14385151 |
| (SEQ ID NO: 2271) | | | | | |
| WAN008EGH_at | 93.84885764 | Mm.25042 | 1E−150 | 87.64044944 | 93.84885764 |
| (SEQ ID NO: 2291) | | | | | |
| WAN008906_at | 94.86238532 | Mm.17519 | 0 | 92.8440367 | 100 |
| (SEQ ID NO: 1833) | | | | | |

[0180] Standard cell engineering methods are used to modify target genes to effect desired cell phenotypes. As discussed above, target genes are modified to achieve desired CHO cell phenotypes by interfering RNA, conventional gene knockout or overexpression methods. Typically, knockout methods or stable transfection methods with overexpression constructs are used to engineer modified CHO cell lines. Other suitable methods are discussed in the general description section and known in the art.

[0181] The foregoing description of the present invention provides illustration and description, but is not intended to be exhaustive or to limit the invention to the precise one disclosed. Modifications and variations are possible consistent with the above teachings or may be acquired from practice of the invention. Thus, it is noted that the scope of the invention is defined by the claims and their equivalents.

### INCORPORATION BY REFERENCE

[0182] All sequence accession numbers, publications and patent documents cited in this application are incorporated by reference in their entirety for all purposes to the same extent as if the contents of each individual publication or patent document was incorporated herein.

What is claimed is:

1. A method for identifying proteins regulating or indicative of a cell culture phenotype in a cell line, the method comprising:
generating a protein expression profile of a sample derived from a test cell line;
comparing the protein expression profile to a control profile derived from a control cell line; and
identifying one or more differentially expressed proteins based on the comparison,
wherein the test cell line has a cell culture phenotype distinct from that of the control cell line, and the one or more differentially expressed proteins are capable of regulating or indicating the cell culture phenotype.

2. The method of claim 1, wherein the cell line is a Chinese hamster ovary (CHO) cell line.

3. The method of claim 1, wherein the cell culture phenotype is a cell growth rate, a cellular productivity, a peak cell density, a sustained cell viability, a rate of ammonia production or consumption, or a rate of lactate production or consumption.

4. The method of claim 3, wherein the cell culture phenotype is a maximum cellular productivity.

5. The method of claim 3, wherein the cell culture phenotype is a sustained cell viability.

6. The method of claim 3, wherein the cell culture phenotype is a peak cell density.

7. The method of claim 3, wherein the cell culture phenotype is a cell growth rate.

8. The method of claim 1, wherein the protein expression profile is generated by fluorescent two-dimensional differential in-gel electrophoresis.

9. (canceled)

10. (canceled)

11. (canceled)

12. (canceled)

13. (canceled)

14. (canceled)

15. A method for improving cellular productivity of a cell line, the method comprising modulating one or more genes or proteins selected from Tables 2, 3, 9, 10, 11, and 12.

16. (canceled)

17. A method for improving cell growth rate of a cell line, the method comprising modulating one or more genes or proteins selected from Tables 4, 5, 6, 13, 14, 27 and 28.

18. (canceled)

19. A method for increasing peak cell density of a cell line, the method comprising modulating one or more genes or proteins selected from Tables 8, 15, 16, and 17.

20. (canceled)

21. A method for increasing sustained cell viability of a cell line, the method comprising modulating one or more genes or proteins selected from Tables 7, 18 and 19.

22. (canceled)

23. A method for improving a cell line, the method comprising modulating one or more genes selected from Tables 20, 24, 25, and 26.

24. A method for modulating a rate of lactate production or consumption in a cell line, the method comprising modulating one or more genes selected from Tables 29 and 30.

25. A method for improving a cell line, the method comprising up-regulating or down-regulating at least two genes or proteins, wherein a first gene or protein affects a first cell culture phenotype and a second gene or protein affects a second, different cell culture phenotype, wherein the cell culture phenotypes are selected from the group consisting of a cell growth rate, a cellular productivity, a peak cell density, a sustained cell viability, a rate of ammonia production or consumption, or a rate of lactate production or consumption.

26. The method of claim 25, further comprising up-regulating or down-regulating a third gene or protein affecting a third cell culture phenotype different from the first and second cell culture phenotypes.

27. (canceled)

28. A method of assessing a cell culture phenotype of a cell line, the method comprising detecting, in a sample from the cell culture, one or more markers indicative of the cell culture phenotype, wherein the markers are selected from the group consisting of peptides selected from FIGS. 7 through 138, proteins selected from Tables 2 through 8, and gene expression products from genes selected from Tables 9 through 20 and 24 through 30.

29. (canceled)

30. An engineered cell line with an improved cellular productivity comprising a population of engineered cells, each of which comprising an engineered construct up-regulating or down-regulating one or more genes or proteins selected from Tables 2, 3, 9, 10, 11, and 12.

31. (canceled)

32. (canceled)

33. An engineered cell line with an improved cell growth rate comprising a population of engineered cells, each of which comprising an engineered construct up-regulating or down-regulating one or more genes or proteins selected from Tables 4, 5, 6, 13, 14, 27 and 28.

34. (canceled)

35. (canceled)

36. An engineered cell line with an improved peak cell density comprising a population of engineered cells, each of which comprising an engineered construct up-regulating or down-regulating one or more genes or proteins selected from Tables 8, 15, 16, and 17.

37. (canceled)

38. (canceled)

39. An engineered cell line with an improved sustained cell viability comprising a population of engineered cells, each of which comprising an engineered construct up-regulating or down-regulating one or more genes or proteins selected from Tables 7, 18 and 19.

40. (canceled)

41. (canceled)

42. An engineered cell line with modified lactate production or consumption, the engineered cell line comprising a population of engineered cells, each of which comprising an engineered construct up-regulating or down-regulating one or more genes selected from Tables 29 and 30.

43. (canceled)

44. (canceled)

45. An improved cell line comprising a population of engineered cells, each of which comprising an engineered construct up-regulating or down-regulating one or more genes or proteins selected from Tables 20, 24, 25 and 26.

46. (canceled)

47. (canceled)

48. (canceled)

49. An isolated or recombinant nucleic acid comprising a CHO sequence selected from Tables 9, 13, and 15.

50. An isolated or recombinant protein comprising a CHO sequence selected from Tables 2 and 4.

The application's sequence listing, which the Patent Office published only in electronic form, follows.

SEQUENCE LISTING (2292 sequences)

SEQ ID NO: 1 - protein, 10 aa, Cricetulus griseus
NKPEDYQGGR

SEQ ID NO: 2 - protein, 14 aa, Cricetulus griseus
TGEAIVDAALSALR

SEQ ID NO: 3 - protein, 13 aa, Cricetulus griseus
GSFSEQGINEFLR

SEQ ID NO: 4 - protein, 17 aa, Cricetulus griseus
HQSLGGQYGVQGFPTIK

SEQ ID NO: 5 - protein, 25 aa, Cricetulus griseus
VGAVDADKHQSLGGQYGVQGFPTIK

SEQ ID NO: 6 - protein, 440 aa, Rattus norvegicus
MARLVLGLVSCTFFLAVSALYSSSDDVIELTPSNFNREVIQSDSLWLVEFYAPWCGHCQRLTPEWKKAASALKDVVKVGAVNADKHQSLGGQYGVQGFPTIKIFGANKNKPEDYQGGRTGEAIVDAALSALRQLVKDRLGGRSGGYSSGKQGRGDSSSKKDVVELTDDTFDKNVLDSEDVWMVEFYAPWCGHCKNLEPEWAAAATEVKEQTKGKVKLAAVDATVNQVLASRYGIKGFPTIKIFQKGESPVDYDGGRTRSDIVSRALDLFSDNAPPPELLEIINEDIAKKTCEEHQLCVVAVLPHILDTGATGRNSYLEVLLKLADKYKKKMWGWLWTEAGAQYELENALGIGGFGYPAMAAINARKMKFALLKGSFSEQGINEFLRELSFGRGSTAPVGGGSFPNITPREPWDGKDGELPVEDDIDLSDVELDDLEKDEL

SEQ ID NO: 7 - protein, 5 aa, Cricetulus griseus
MIDER

SEQ ID NO: 8 - protein, 6 aa, Cricetulus griseus
LGDLRR

SEQ ID NO: 9 - protein, 8 aa, Cricetulus griseus
GVGQAAIR

SEQ ID NO: 10 - protein, 8 aa, Cricetulus griseus
GLVAEGHR

SEQ ID NO: 11 - protein, 9 aa, Cricetulus griseus
GEGESPQAR

SEQ ID NO: 12 - protein, 8 aa, Cricetulus griseus
SFLDSGYR

SEQ ID NO: 13 - protein, 8 aa, Cricetulus griseus
QLHDEARK

SEQ ID NO: 14 - protein, 10 aa, Cricetulus griseus
AANFENHSGR

SEQ ID NO: 15 - protein, 9 aa, Cricetulus griseus
TNLLQVCER

SEQ ID NO: 16 - protein, 9 aa, Cricetulus griseus
NQWIDNVEK

SEQ ID NO: 17 - protein, 10 aa, Cricetulus griseus
LANVMMGPYR

SEQ ID NO: 18 - protein, 10 aa, Cricetulus griseus
MSAEINEIIR

SEQ ID NO: 19 - protein, 11 aa, Cricetulus griseus
SLLDASEEAIK

SEQ ID NO: 20 - protein, 10 aa, Cricetulus griseus
MALLMAEMSR

SEQ ID NO: 21 - protein, 11 aa, Cricetulus griseus
ELTPQVISAAR

SEQ ID NO: 22 - protein, 10 aa, Cricetulus griseus
WIDNPTVDDR

SEQ ID NO: 23 - protein, 11 aa, Cricetulus griseus
ALIQCAKDIAK

SEQ ID NO: 24 - protein, 10 aa, Cricetulus griseus
QQELTHQEHR

SEQ ID NO: 25 - protein, 12 aa, Cricetulus griseus
ILSTVKATMLGR

SEQ ID NO: 26 - protein, 15 aa, Cricetulus griseus
DPNASPGDAGEQAIR

SEQ ID NO: 27 - protein, 13 aa, Cricetulus griseus
ETVQTTEDQILKR

SEQ ID NO: 28 - protein, 15 aa, Cricetulus griseus
NPGNQAAYEHFETMK

SEQ ID NO: 29 - protein, 15 aa, Cricetulus griseus
DMPPAFIKVENACTK

SEQ ID NO: 30 - protein, 15 aa, Cricetulus griseus
MLGQMTDQVADLRAR

SEQ ID NO: 31 - protein, 19 aa, Cricetulus griseus
GWLRDPNASPGDAGEQAIR

SEQ ID NO: 32 - protein, 1066 aa, Mus musculus
MPVFHTRTIESILEPVAQQISHLVIMHEEGEVDGKAIPDLTAPVAAVQAAVSNLVRVGKETVQTTEDQILKRDMPPAFIKVENACTKLVQAAQMLQSDPYSVPARDYLIDGSRGILSGTSDLLLTFDEAEVRKIIRVCKGILEYLTVAEVVETMEDLVTYTKNLGPGMTKMAKMIDERQQELTHQEHRVMLVNSMNTVKELLPVLISAMKIFVTTKNSKNQGIEEALKNRNFTVEKMSAEINEIIRVLQLTSWDEDAWASKDTEAMKRALASIDSKLNQAKGWLRDPNASPGDAGEQAIRQILDEAGKVGELCAGKERREILGTCKMLGQMTDQVADLRARGQGASPVAMQKAQQVSQGLDVLTAKVENAARKLEAMTNSKQSIAKKIDAAQNWLADPNGGPEGEEQIRGALAEARKIAELCDDPKERDDILRSLGEIAALTSKLGDLRRQGKGDSPEARALAKQVATALQNLQTKTNRAVANSRPAKAAVHLEGKIEQAQRWIDNPTVDDRGVGQAAIRGLVAEGHRLANVMMGPYRQDLLAKCDRVDQLTAQLADLAARGEGESPQARALASQLQDSLKDLKAQMQEAMTQEVSDVFSDTTTPIKLLAVAATAPPDAPNREEVFDERAANFENHSGRLGATAEKAAAVGTANKSTVEGIQASVKTARELTPQVISAARILLRNPGNQAAYEHFETMKNQWIDNVEKMTGLVDEAIDTKSLLDASEEAIKKDLDKCKVAMANIQPQMLVAGATSIARRANRILLVAKREVENSEDPKFREAVKAASDELSKTISPMVMDAKAVAGNISDPGLQKSFLDSGYRILGAVAKVREAFQPQEPDFPPPPPDLEQLRLTDELAPPKPPLPEGEVPPPRPPPPEEKDEEFPEQKAGEVINQPMMMAARQLHDEARKWSSKGNDIIAAAKRMALLMAEMSRLVRGGSGTKRALIQCAKDIAKASDEVTRLAKEVAKQCTDKRIRTNLLQVCERIPTISTQLKILSTVKATMLGRTNISDEESEQATEMLVHNAQNLMQSVKETVREAEAASIKIRTDAGFTLRWVRKTPWYQ

SEQ ID NO: 33 - protein, 6 aa, Cricetulus griseus
VEPPLR

SEQ ID NO: 34 - protein, 6 aa, Cricetulus griseus
VLTFYR

SEQ ID NO: 35 - protein, 8 aa, Cricetulus griseus
NTVQGFKR

SEQ ID NO: 36 - protein, 8 aa, Cricetulus griseus
VTYMEEER

SEQ ID NO: 37 - protein, 9 aa, Cricetulus griseus
FQESEERPK

SEQ ID NO: 38 - protein, 11 aa, Cricetulus griseus
AFSDPFVEAEK

SEQ ID NO: 39 - protein, 11 aa, Cricetulus griseus
QDLPALEEKPR

SEQ ID NO: 40 - protein, 11 aa, Cricetulus griseus
NAVEEYVYEMR

SEQ ID NO: 41 - protein, 14 aa, Cricetulus griseus
AGGIETIANEYSDR

SEQ ID NO: 42 - protein, 16 aa, Cricetulus griseus
NKEDQYEHLDAADMTK

SEQ ID NO: 43 - protein, 840 aa, Rattus norvegicus
MSVVGIDLGFQSCYVAVARAGGIETIANEYSDRCTPACVSFGPKNRSVGAAAKSQVISNAKNTVQGFKRFHGRAFSDPFVEAEKSNLAYDIVQLPTGLTGIKVTYMEEERNFTTEQVTAMLLSKLKETAESVLKKPVVDCVVSVPSFYTDAERRSVMDATQIAGLNCLRLMNETTAVALAYGIYKQDLPALEEKPRNVVFVDMGHSAYQVSVCAFNRGKLKVLATAFDTTLGGRKFDEVLVNHFCEEFGKKYKLDIKSKVRALLRLSQECEKLKKLMSANASDLPLSIECFMNDIDVSGTMNRGKFLEMCDDLLARVEPPLRSILDQSKLKKEDIYAVEIVGGATRIPAVKEKISKFFGKELSTTLNADEAVTRGCALQCAILSPAFKVREFSITDVVPYPISLRWNSPAEEGSSDCEVFPKNHAAPFSKVLTFYRKEPFTLEAYYSSPQDLPYPDPAIAQFSVQKVTPQSDGSSSKVKVKVRVNVHGIFSVSSAALVEVHKSEESEEPMETDQNAKEEEKMQVDQEEPHTEEQQPQTPAENKAESEEMETSQAGSKDKKMDQPPQAKKAKVKTSTVDLPIESQLLWQLDREMLGLYTENEGKMIMQDKLEKERNDAKNAVEEYVYEMRDKLSGEYEKFVSEDDRNNFTLKLEDTENWLYEDGEDQPKQVYVDKLAELRTLGQPIKTRFQESEERPKLFEELGKQIQQYMKVISSFKNKEDQYEHLDAADMTKVEKSTNEAMEWMNSKLNLQNKQSLTADPVVKTKEIEAKIKELTNICSPIISKPKPKVEPPKEEPKHAEQNGPVDGQGDNPGTQAAEHGADTAVPSDGDKKLPEMDID

SEQ ID NO: 44 - protein, 6 aa, Cricetulus griseus
GSKFIK

SEQ ID NO: 45 - protein, 7 aa, Cricetulus griseus
LSTALAR

SEQ ID NO: 46 - protein, 6 aa, Cricetulus griseus
LYLQTR

SEQ ID NO: 47 - protein, 7 aa, Cricetulus griseus
TLLAILR

SEQ ID NO: 48 - protein, 7 aa, Cricetulus griseus
SQYTTGR

SEQ ID NO: 49 - protein, 7 aa, Cricetulus griseus
VSEVKPR

SEQ ID NO: 50 - protein, 6 aa, Cricetulus griseus
YIAMCR

SEQ ID NO: 51 - protein, 10 aa, Cricetulus griseus
AGILTTLNAR

SEQ ID NO: 52 - protein, 9 aa, Cricetulus griseus
SQLLSYIDR

SEQ ID NO: 53 - protein, 13 aa, Cricetulus griseus
GSSGVGLTAAVLR

SEQ ID NO: 54 - protein, 10 aa, Cricetulus griseus
DVLDVYIEHR

SEQ ID NO: 55 - protein, 11 aa, Cricetulus griseus
YGTQLVHLAHR

SEQ ID NO: 56 - protein, 13 aa, Cricetulus griseus
CSILAAANPAYGR

SEQ ID NO: 57 - protein, 13 aa, Cricetulus griseus
TQRPADVIFATVR

SEQ ID NO: 58 - protein, 12 aa, Cricetulus griseus
NPQNQYPSELMR

SEQ ID NO: 59 - protein, 12 aa, Cricetulus griseus
NPQNQYPSELMR

SEQ ID NO: 60 - protein, 13 aa, Cricetulus griseus
LAQHITYVHQHSR

SEQ ID NO: 61 - protein, 15 aa, Cricetulus griseus
IQEHSDQVPVGNIPR

SEQ ID NO: 62 - protein, 719 aa, Rattus norvegicus
MALKDYAIEKEKVKKFLQEFYYDDELGKKQFKYGTQLVHLAHREQVALYVDLDDVAEDDPELVDSICENAKRYSRLFADVVQELLPEYKEKEVVNKDVLDVYIEHRLMMEQRSRDPGAVRNPQNQYPSELMRRFELYFQGPSSSKPRVIREVRADSVGKLLTVRGIVTRVSEVKPRMVVATYTCDQCGAETYQPIQSPTFMPLIMCPSQECQTNRSGGRLYLQTRGSKFIKFQEMKIQEHSDQVPVGNIPRSITVVLEGENTRIAQPGDHVSVTGIFLPVLRTGFQQMAQGLLSETYLEAHRVVKMTKSEDDVSGAGELSAEELKQIAEEDFYEKLAASIAPEIYGHEDVKKALLLLLVGGVDQSPQGMKIRGNIHICLMGDPGVAKSQLLSYIDRLAPRSQYTTGRGSSGVGLTAAVLRDSVSGELTLEGGALVLADQGVCCIDEFDKMAEADRTAIHEVMEQQTISIAKAGILTTLNARCSILAAANPAYGRYNPRRSLEQNIQLPAALLSRFDLLWLIQDRPDRDNDLRLAQHITYVHQHSRQPPAQFEPLDMKLMRRYIAMCRERQPTVPDSLADYITAAYVEMRREARASKDATYTSARTLLAILRLSTALARLRMVDIVEKEDVNEAIRLMEMSKDSLLGEKGQTARTQRPADVIFATVRELVSGGRSVRFSEAEQRCISRGFTPAQFQAALDEYEELNVWQVNTSRTRITFV

SEQ ID NO: 63 - protein, 7 aa, Cricetulus griseus
LEHAQAR

SEQ ID NO: 64 - protein, 7 aa, Cricetulus griseus
LTLSYNR

SEQ ID NO: 65 - protein, 8 aa, Cricetulus griseus
QIVTTDLR

SEQ ID NO: 66 - protein, 8 aa, Cricetulus griseus
LAEEAFFR

SEQ ID NO: 67 - protein, 10 aa, Cricetulus griseus
LPPEVEAGQR

SEQ ID NO: 68 - protein, 10 aa, Cricetulus griseus
ESPPQQQPPR

SEQ ID NO: 69 - protein, 13 aa, Cricetulus griseus
MLDGEVTDAVEAR

SEQ ID NO: 70 - protein, 794 aa, Homo sapiens
MELRPWLLWVVAATGTLVLLAADAQGQKVFTNTWAVRIPGGPAVANSVARKHGFLNLGQIFGDYYHFWHRGVTKRSLSPHRPRHSRLQREPQVQWLEQQVAKRRTKRDVYQEPTDPKFPQQWYLSGVTQRDLNVKAAWAQGYTGHGIVVSILDDGIEKNHPDLAGNYDPGASFDVNDQDPDPQPRYTQMNDNRHGTRCAGEVAAVANNGVCGVGVAYNARIGGVRMLDGEVTDAVEARSLGLNPNHIHIYSASWGPEDDGKTVDGPARLAEEAFFRGVSQGRGGLGSIFVWASGNGGREHDSCNCDGYTNSIYTLSISSATQFGNVPWYSEACSSTLATTYSSGNQNEKQIVTTDLRQKCTESHTGTSASAPLAAGIIALTLEANKNLTWRDMQHLVVQTSKPAHLNANDWATNGVGRKVSHSYGYGLLDAGAMVALAQNWTTVAPQRKCIIDILTEPKDIGKRLEVRKTVTACLGEPNHITRLEHAQARLTLSYNRRGDLAIHLVSPMGTRSTLLAARPHDYSADGFNDWAFMTTHSWDEDPSGEWVLEIENTSEANNYGTLTKFTLVLYGTAPEGLPVPPESSGCKTLTSSQACVVCEEGFSLHQKSCVQHCPPGFAPQVLDTHYSTENDVETIRASVCAPCHASCATCQGPALTDCLSCPSHASLDPVEQTCSRQSQSSRESPPQQQPPRLPPEVEAGQRLRAGLLPSHLPEVVAGLSCAFIVLVFVTVFLVLQLRSGFSFRGVKVYTMDRGLISYKGLPPEAWQEECPSDSEEDEGRGERTAFIKDQSAL

SEQ ID NO: 71 - protein, 6 aa, Cricetulus griseus
MSQHYR

SEQ ID NO: 72 - protein, 9 aa, Cricetulus griseus
AASTEADKK

SEQ ID NO: 73 - protein, 9 aa, Cricetulus griseus
LKPLGEQER

SEQ ID NO: 74 - protein, 8 aa, Cricetulus griseus
FYLDLYPR

SEQ ID NO: 75 - protein, 10 aa, Cricetulus griseus
QANAGLFNLR

SEQ ID NO: 76 - protein, 9 aa, Cricetulus griseus
YRVDQNLLK

SEQ ID NO: 77 - protein, 9 aa, Cricetulus griseus
EYFPMQWTR

SEQ ID NO: 78 - protein, 10 aa, Cricetulus griseus
YYMNQVEETR

SEQ ID NO: 79 - protein, 12 aa, Cricetulus griseus
NGLHLPQDTQEK

SEQ ID NO: 80 - protein, 13 aa, Cricetulus griseus
ALADVEVTYTVQR

SEQ ID NO: 81 - protein, 13 aa, Cricetulus griseus
NLNEDTTFLPFTR

SEQ ID NO: 82 - protein, 19 aa, Cricetulus griseus
VDQVLHTQTDADPAEEYAR

SEQ ID NO: 83 - protein, 687 aa, Mus musculus
MKPPAACAGDVVDAASPASTVNHLRWDLSAQQIRALTTQLIEQTKCVYDRVGAQNFEDVSYESTLKALADVEVTYTVQRNILDFPQHVSPCKDIRAASTEADKKLSEFDVEMSMRQDVYQRVVWLQEKTPKNSLKPEAARYLERLIKLGRRNGLHLPQDTQEKIKNIKKRLSLLCIDFNKNLNEDTTFLPFTREELGGLPEDFLSSLEKAEDGKLKVTLKYPHYFPLLKKCHVPETRRLLEEAFNCRCKEENCAILKELVSLRAQKSSLLGFHTHADYVLEMNMAKTSQTVATFLDELAQKLKPLGEQERAVILELKEAECAKRGLPFDGRIHAWDMRYYMNQVEETRYRVDQNLLKEYFPMQVVTRGLLAIYQELLGLTFTLEEGAAAWHEDVRLYSVRDAASGEEIGKFYLDLYPREGKYGHAACFGLQPGCLRQDGSRQLAVAAMVANFTKPTPDAPSLLQHDEVETYFHEFGHVMHQLCSQAEFAMFSGTHVERDFVEAPSQMLENWVWEKEPLMRMSQHYRTGSEAPQDLLEKLIKSRQANAGLFNLRQIVLAKVDQVLHTQTDADPAEEYARLCQEILGVPATPGTNMPATFGHLAGGYDAQYYGYLWSEVYSMDMFHTRFKQEGVLSPKVGMDYRTSILRPGGSEDASAMLKQFLGRDPKQDAFLLSKGLQVEGSEAPAC

SEQ ID NO: 84 - protein, 7 aa, Cricetulus griseus
LIHGGVR

SEQ ID NO: 85 - protein, 8 aa, Cricetulus griseus
RVPIPVDR

SEQ ID NO: 86 - protein, 10 aa, Cricetulus griseus
GFIRIVDVQR

SEQ ID NO: 87 - protein, 9 aa, Cricetulus griseus
FLYYEMGYK

SEQ ID NO: 88 - protein, 10 aa, Cricetulus griseus
ALEHFPMLQK

SEQ ID NO: 89 - protein, 11 aa, Cricetulus griseus
DVLTGQEFDVR

SEQ ID NO: 90 - protein, 13 aa, Cricetulus griseus
CKDVLTGQEFDVR

SEQ ID NO: 91 - protein, 16 aa, Cricetulus griseus
LVGAIVYYDGQHNDAR

SEQ ID NO: 92 - protein, 727 aa, Mus musculus
MAFQKAVKGTILVGGGALATVLGLSQFAHYRRKQVSLAYVEAAGYLTEPVNREPPSREAQLMTLKNTPEFDILVIGGGATGCGCALDAVTRGLKTALVERDDFSSGTSSRSTKLIHGGVRYLQKAIMNLDVEQYRMVKEALHERANLLEIAPHLSAPLPIMLPLYKWWQLPYYWVGIKMYDLVAGSQCLKSSYVLSKSRALEHFPMLQKDKLVGAIVYYDGQHNDARMNLAIALTAARYGAATANYMEVVSLLKKTDPETGKERVSGARCKDVLTGQEFDVRAKCVINASGPFTDSVRKMDDKNVVPICQPSAGVHIVMPGYYSPENMGLLDPATSDGRVIFFLPWEKMTIAGTTDTPTDVTHHPIPSEEDINFILNEVRNYLSSDVEVRRGDVLAAWSGIRPLVTDPKSADTQSISRNHVVDISDSGLITIAGGKWTTYRSMAEDTVNAAVKFHNLNAGPSRTVGLFLQGGKDWSPTLYIRLVQDYGLESEVAQHLAKTYGDKAFEVAKMASVTGKRWPVVGVRLVSEFPYIEAEVKYGIKEYACTAVDMISRRTRLAFLNVQAAEEALPRIVELMGRELNWSELRKQEELETATRFLYYEMGYKSRTEQLTDSTEISLLPSDIDRYKKRFHKFDEDEKGFITIVDVQRVLESINVQMDENTLHEILCEVDLNKNGQVELHEFLQLMSAVQKGRVSGSRLAILMKTAEENLDRRVPIPVDRSCGGL

SEQ ID NO: 93 - protein, 8 aa, Cricetulus griseus
IVAPPGGR

SEQ ID NO: 94 - protein, 7 aa, Cricetulus griseus
QQAPPVR

SEQ ID NO: 95 - protein, 7 aa, Cricetulus griseus
TIEAHSR

SEQ ID NO: 96 - protein, 9 aa, Cricetulus griseus
KPFPDFVYK

SEQ ID NO: 97 - protein, 10 aa, Cricetulus griseus
KNIPPITSDR

SEQ ID NO: 98 - protein, 12 aa, Cricetulus griseus
MVIPGGIDVHTR

SEQ ID NO: 99 - protein, 12 aa, Cricetulus griseus
MVIPGGIDVHTR

SEQ ID NO: 100 - protein, 13 aa, Cricetulus griseus
QIGENLIVPGGVK

SEQ ID NO: 101 - protein, 15 aa, Cricetulus griseus
GLYDGPVCEVSVTPK

SEQ ID NO: 102 - protein, 16 aa, Cricetulus griseus
IVLEDGTLHVTEGSGR

SEQ ID NO: 103 - protein, 16 aa, Cricetulus griseus
MDENQFVAVTSTNAAK

SEQ ID NO: 104 - protein, 16 aa, Cricetulus griseus
DNFTLIPEGTNGTEER

SEQ ID NO: 105 - protein, 16 aa, Cricetulus griseus
SITIANQTNCPLYVTK

SEQ ID NO: 106 - protein, 572 aa, Mus musculus
MSYQGKKNIPPITSDRLLIKGGKIVNDDQSFYADIYMEDGLIKQIGENLIVPGGVKTIEAHSRMVIPGGIDVHTRFQMPDQGMTSADDFFQGTKAALAGGTTMIIDHVVPEPGTSLLAAFDQWREWADSKSCCDYSLHVDITEWHKGIQEEMEALVKDHGVNSFLVYMAFKDRFQLTDSQIYEVLSVIRDIGAIAQVHAENGDIIAEAQQRILDLGITGPEGHVLSRPEEVEAEAVNRSITIANQTNCPLYVTKVMPKSAAEVIAQARKKGTVVYGEPITASLGTDGSHYWSKNWAKAAAFVTSPPLSPDPTTPDFLNSLLSCGDLQVTGSAHCTFNTAQKAVGKDNFTLIPEGTNGTEERMSVIWDKAVVTGKMDENQFVAVTSTNAAKVFNLYPRKGRISVGSDADLVIWDPDSVKTISAKTHNSALEYNIFEGMECRGSPLVVISQGKIVLEDGTLHVTEGSGRYIPRKPFPDFVYKRIKARSRLAELRGVPRGLYDGPVCEVSVTPKTVTPASSAKTSPAKQQAPPVRNLHQSGFSLSGAQIDDNIPRRTTQRIVAPPGGRANITSLG

SEQ ID NO: 107 - protein, 6 aa, Cricetulus griseus
LLTSLR

SEQ ID NO: 108 - protein, 7 aa, Cricetulus griseus
TIADIIR

SEQ ID NO: 109 - protein, 8 aa, Cricetulus griseus
EILSEVER

SEQ ID NO: 110 - protein, 9 aa, Cricetulus griseus
TVQFEENGR

SEQ ID NO: 111 - protein, 9 aa, Cricetulus griseus
IVSRPEELR

SEQ ID NO: 112 - protein, 11 aa, Cricetulus griseus
AVAQALEVIPR

SEQ ID NO: 113 - protein, 12 aa, Cricetulus griseus
TLIQNCGASTIR

SEQ ID NO: 114 - protein, 11 aa, Cricetulus griseus
AMTGVEQWPYR

SEQ ID NO: 115 - protein, 12 aa, Cricetulus griseus
GISDLAQHYLMR

SEQ ID NO: 116 - protein, 13 aa, Cricetulus griseus
IPGGIIEDSCVLR

SEQ ID NO: 117 - protein, 545 aa, Rattus norvegicus
MMGHRPVLVLSQNTKRESGRKVQSGNINAAKTIADIIRTCLGPKSMMKMLLDPMGGIVMTNDGNAILREIQVQHPAAKSMIEISRTQDEEVGDGTTSVIILAGEMLSVAEHFLEQQMHPTVVISAYRMALDDMVSTLKKISTPVDVNNRDMMLNIINSSITTKVISRWSSLACNIALDAVKTVQFEENGRKEIDIKKYARVEKIPGGIIEDSCVLRGVMINKDVTHPRMRRYIKNPRIVLLDSSLEYKKGESQTDIEITREEDFTRILQMEEEYIQQLCEDIIQLKPDVVITEKGISDLAQHYLMRANVTAIRRVRKTDNNRIARACGARIVSRPEELREDDVGTGAGLLEIKKIGDEYFTFITDCKDPKACTILLRGASKEILSEVERNLQDAMQVCRNVLLDPQLVPGGGASEMAVAHALTEKSKAMTGVEQWPYRAVAQALEVIPRTLIQNCGASTIRLLTSLRAKHTQENCETWGVNGETGTLVDMKELGIWEPLAVKLQTYKTAVETAVLLLRIDDIVSGHKKKGDDQNRQTGAPDAGQE

SEQ ID NO: 118 - protein, 5 aa, Cricetulus griseus
EHCQR

SEQ ID NO: 119 - protein, 6 aa, Cricetulus griseus
AILERK

SEQ ID NO: 120 - protein, 7 aa, Cricetulus griseus
EFEPLLK

SEQ ID NO: 121 - protein, 8 aa, Cricetulus griseus
VQQLAGQR

SEQ ID NO: 122 - protein, 7 aa, Cricetulus griseus
WEEEGFR

SEQ ID NO: 123 - protein, 9 aa, Cricetulus griseus
RVQQLAGQR

SEQ ID NO: 124 - protein, 10 aa, Cricetulus griseus
MLPAVTFEGK

SEQ ID NO: 125 - protein, 9 aa, Cricetulus griseus
TLYQLQAER

SEQ ID NO: 126 - protein, 11 aa, Cricetulus griseus
GMYQVGLPSQK

SEQ ID NO: 127 - protein, 13 aa, Cricetulus griseus
VAVLLLAGGQGTR

SEQ ID NO: 128 - protein, 14 aa, Cricetulus griseus
KLQSPFILDEDQAR

SEQ ID NO: 129 - protein, 507 aa, Rattus norvegicus
MASERDVRAKLQRAGQDHLLRFWADLAPELRAALLAELSSLEADALREHCQRASAASALASGPLPDLAARLQPLPPERLGSAIRCDQETRLRWEEEGFRQIALNKVAVLLLAGGQGTRLGVTYPKGMYQVGLPSQKTLYQLQAERIRRVQQLAGQRLGTHCTVPWYIMTSEFTLGPTIKFFKEHDFFHLDPANVVLFEQRMLPAVTFEGKAILERKDKVAMAPDGNGGLYCALADHQILEDMEQRGVEFVHVYCVDNILVRLADPAFIGFCVLQGADCGAKVVEKAYPEEPVGVVCQVDGVPQVVEYSEISPEIARQCGADGGLLYNAGNICNHFFTRGFLDMVIREFEPLLKLHVAVKKVPYVDEEGNLVKPLRPNGIKMEKFVFDVLPFAKNFVAFEVCREEEFSPLKNADTADRDNPSTSRRALLVQHYRWALQAGAHFLDVHGVQLPEQSGLLPNGDPPAICEISPLVSYSGEGLETYLQGRKLQSPFILDEDQARLLQSQEC

SEQ ID NO: 130 - protein, 6 aa, Cricetulus griseus
LQVVGR

SEQ ID NO: 131 - protein, 6 aa, Cricetulus griseus
VVNCAR

SEQ ID NO: 132 - protein, 7 aa, Cricetulus griseus
MQSFGMK

SEQ ID NO: 133 - protein, 9 aa, Cricetulus griseus
TLGILGLGR

SEQ ID NO: 134 - protein, 9 aa, Cricetulus griseus
FMGTELNGK

SEQ ID NO: 135 - protein, 10 aa, Cricetulus griseus
QADVNLVNAK

SEQ ID NO: 136 - protein, 10 aa, Cricetulus griseus
QIPQATASMK

SEQ ID NO: 137 - protein, 11 aa, Cricetulus griseus
GGIVDEGALLR

SEQ ID NO: 138 - protein, 11 aa, Cricetulus griseus
VTADVINAAEK

SEQ ID NO: 139 - protein, 10 aa, Cricetulus griseus
KFMGTELNGK

SEQ ID NO: 140 - protein, 12 aa, Cricetulus griseus
ILQDGGLQVVEK

SEQ ID NO: 141 - protein, 13 aa, Cricetulus griseus
GTIQVVTQGTSLK

SEQ ID NO: 142 - protein, 15 aa, Cricetulus griseus
AGTGVDNVDLEAATR

SEQ ID NO: 143 - protein, 533 aa, Rattus norvegicus
MAFANLRKVLISDSLDPCCRKILQDGGLQVVEKQNLSKEELIAELQDCEGLIVRSATKVTADVINAAEKLQVVGRAGTGVDNVDLEAATRKGILVMNTPNGNSLSAAELTCGMIMCLARQIPQATASMKDGKWDRKKFMGTELNGKTLGILGLGRIGREVATRMQSFGMKTVGYDPIISPEVAASFGVQQLPLEEIWPLCDFITVHTPLLPSTTGLLNDSTFAQCKKGVRVVNCARGGIVDEGALLRALQSGQCAGAALDVFTEEPPRDRALVDHENVISCPHLGASTKEAQSRCGEEIAVQFVDMVKGKSLTGVVNAQALTSAFSPHTKPWIGLAEAMGTLMHAWAGSPKGTIQVVTQGTSLKNAGTCLSPAVIVGLLREASKQADVNLVNAKLLVKEAGLNVTTSHNPGVPGEQGSGECLLTVALAGAPYQAVGLVQGTTPMLQMLNGAVFRPEVPLRRGQPLLVFRAQPSDPGMLPTMIGLLAEAGVQLLSYQTSMVSDGEPWHVMGLSSLLPSLETWKQHVLEAFQFCF

SEQ ID NO: 144 - protein, 6 aa, Cricetulus griseus
VAETAR

SEQ ID NO: 145 - protein, 6 aa, Cricetulus griseus
EDDKYR

SEQ ID NO: 146 - protein, 8 aa, Cricetulus griseus
EANEILQR

SEQ ID NO: 147 - protein, 9 aa, Cricetulus griseus
NRDYPLASK

SEQ ID NO: 148 - protein, 9 aa, Cricetulus griseus
YFSEGDKVK

SEQ ID NO: 149 - protein, 11 aa, Cricetulus griseus
NILDAGVDGLR

SEQ ID NO: 150 - protein, 11 aa, Cricetulus griseus
QLLCGAAVGTR

SEQ ID NO: 151 - protein, 12 aa, Cricetulus griseus
IAQGVSGSIQDK

SEQ ID NO: 152 - protein, 18 aa, Cricetulus griseus
TMSAQIEGGVHGLHSYEK

SEQ ID NO: 153 - protein, 514 aa, Mus musculus
MADYLISGGTGYVPEDGLTAHELFANADGLTYNDFLILPGFIDFIADEVDLTSALTRKITLKTPLISSPMDTVTEADMAIAMALMGGIGFIHHNCTPEFQANEVRKVKKFEQGFITDPVVLSPSHTVGDVLEAKIQHGFSGIPITATGTMGSKLVGIVTSRDIDFLAEKDHTTLLSEVMTPRVELVVAPAGVTLKEANEILQRSKKGKLPIVNDQDELVAIIARTDLKKNRDYPLASKDSHKQLLCGAAVGTREDDKYRLDLLTQAGADVIVHDSSQGNSVYQIAMVHYIKQKYPHLQVIGGNVVTAAQAKNLIDAGVDGLRVGMGCGSICITQEVMACGRPQGTAVYKVAEYARRFGVPVIADGGIQTVGHVVKALALGASTVMMGSLLAATTEAPGEYFFSDGVRLKKYRGIGSLDAMEKSSSSQKRYFSEGDKVKIAQGVSGSIQDKGSIQKFVPYLIAGIQHGCQDIGAQSLSVLRSMMYSGELKFEKRTMSAQIEGGVHGLHSYEKRLY

SEQ ID NO: 154 - protein, 8 aa, Cricetulus griseus
YAYYDTER

SEQ ID NO: 155 - protein, 12 aa, Cricetulus griseus
AYVSTLMGVPGR

SEQ ID NO: 156 - protein, 11 aa, Cricetulus griseus
FLMSLVNQVPK

SEQ ID NO: 157 - protein, 17 aa, Cricetulus griseus
VIGLSSDLQQVGGASAR

SEQ ID NO: 158 - protein, 16 aa, Cricetulus griseus
YAYYDTERIGVDLIMK

SEQ ID NO: 159 - protein, 361 aa, Mus musculus
MASPAVPANVPPATAAAAPAPVVTAAPASAPTPSTPAPTPAATPAASPAPVSSDPAVAAPAAPGQTPASAPAPAQTPAPSQPGPALPGPFPGGRVVRLHPVILASIVDSYERRNEGAARVIGTLLGTVDKHSVEVTNCFSVPHNESEDEVAVDMEFAKNMYELHKKVSPNELILGWYATGHDITEHSVLIHEYYSREAPNPIHLTVDTGLQHGRMSIKAYVSTLMGVPGRTMGVMFTPLTVKYAYYDTERIGVDLIMKTCFSPNRVIGLSSDLQQVGGASARIQDALSTVLQYAEDVLSGKVSADNTVGRFLMSLVNQVPKIVPDDFETMLNSNINDLLMVTYLANLTQSQIALNEKLVNL

SEQ ID NO: 160 - protein, 6 aa, Cricetulus griseus
FNHSHR

SEQ ID NO: 161 - protein, 8 aa, Cricetulus griseus
GEVPAELR

SEQ ID NO: 162 - protein, 8 aa, Cricetulus griseus
FYAGGSER

SEQ ID NO: 163 - protein, 9 aa, Cricetulus griseus
EHGAVAVER

SEQ ID NO: 164 - protein, 9 aa, RGEVPAELR
RGEVPAELR

SEQ ID NO: 165 - protein, 9 aa, Cricetulus griseus
GEVPAELRR

SEQ ID NO: 166 - protein, 10 aa, Cricetulus griseus
SGQQIVGPPR

SEQ ID NO: 167 - protein, 10 aa, Cricetulus griseus
MAEERQDALR

SEQ ID NO: 168 - protein, 11 aa, Cricetulus griseus
HSGQDVHVVLK

SEQ ID NO: 169 - protein, 12 aa, Cricetulus griseus
EFVAVTGAEEDR

SEQ ID NO: 170 - protein, 12 aa, Cricetulus griseus
EANLLNAVIVQR

SEQ ID NO: 171 - protein, 14 aa, Cricetulus griseus
EFVAVTGAEEDRAR

SEQ ID NO: 172 - protein, 16 aa, Cricetulus griseus
LGAAPEEESAYVAGER

SEQ ID NO: 173 - protein, 15 aa, Cricetulus griseus
SYQDPSNAQFLESIR

SEQ ID NO: 174 - protein, 17 aa, Cricetulus griseus
SPGETSKPRPFAGGGYR

SEQ ID NO: 175 - protein, 17 aa, Cricetulus griseus
DLIHDQDEEEEEEEGQR

SEQ ID NO: 176 - protein, 23 aa, Cricetulus griseus
LGSTAPQVLNTSSPAQQAENEAK

SEQ ID NO: 177 - protein, 370 aa, Rattus norvegicus
MAEERQDALREFVAVTGAEEDRARFFLESAGWDLQIALASFYEDGGDEDIVTISQATPSSVSRGTAPSDNRVTSFRDLIHDQDEEEEEEEGQRFYAGGSERSGQQIVGPPRKKSPNELVDDLFKGAKEHGAVAVERVTKSPGETSKPRPFAGGGYRLGAAPEEESAYVAGERRRHSGQDVHVVLKLWKTGFSLDNGDLRSYQDPSNAQFLESIRRGEVPAELRRLAHGGQVNLDMEDHRDEDFVKPKGAFKAFTGEGQKLGSTAPQVLNTSSPAQQAENEAKASSSILINEAEPTTNIQIRLADGGRLVQKFNHSHRISDIRLFIVDARPAMAATSFVLMTTFPNKELADENQTLKEANLLNAVIVQRLT

SEQ ID NO: 178 - protein, 9 aa, Cricetulus griseus
NLFEEANKK

SEQ ID NO: 179 - protein, 11 aa, Cricetulus griseus
TVTSQQSQIEK

SEQ ID NO: 180 - protein, 12 aa, Cricetulus griseus
ARPFSALTLSCK

SEQ ID NO: 181 - protein, 11 aa, Cricetulus griseus
NLEEDCVRQQR

SEQ ID NO: 182 - protein, 13 aa, Cricetulus griseus
TVTSQQSQIEKYK

SEQ ID NO: 183 - protein, 18 aa, Cricetulus griseus
MLSFSEEEFMKALEWGSS

SEQ ID NO: 184 - protein, 387 aa, Mus musculus
MAGRSVRVPRRGSAGTQSRGQLAAGRDLLAREQEYKRLNEELEAKTADLVRQAEEVIREQQEVRARPFSALTTSCKEEGGSSSRDLLSSEGTHPWTETKPKTKNTGPVNKIQNRLHSADKERKTNSSAKLKYPDAQTANDVAIPDDFSDFSLAKTISRIEGQLDEDGLPECAEDDSFCGVSKDIGTEAQIRFLKAKLHVMQEELDSVVCECSKKEDKIQDLKSKVKNLEEDCVRQQRTVTSQQSQIEKYKNLFEEANKKCDELQQQLSSVERELESKRRLQKQAASSQSATEVRLNRALEEAEKYKVELSKLRQTNKDITNEDHQKIEVLKSENKKLERQKGELMIGFKKQLKLIDILKRQKMHIEAAKMLSFSEEEFMKALEWGSS

SEQ ID NO: 185 - protein, 7 aa, Cricetulus griseus
DLALAIR

SEQ ID NO: 186 - protein, 13 aa, Cricetulus griseus
QAALQVADGFISR

SEQ ID NO: 187 - protein, 14 aa, Cricetulus griseus
YSPNTQVEILPQGR

SEQ ID NO: 188 - protein, 16 aa, Cricetulus griseus
EVQGNESDLFMSYFPR

SEQ ID NO: 189 - protein, 22 aa, Cricetulus griseus
EGNPEEDITADQTNAQAAALYK

SEQ ID NO: 190 - protein, 349 aa, Rattus norvegicus
MYTPIPQSGSPFPASVQDPGLHIWRVEKLKPVPIARESHGIFFSGDSYLVLHNGPEEASHLHLWIGQQSSRDEQGACAVLAVHLNTLLGERPVQHREVQGNESDLFMSYFPRGLKYREGGVESAFHKTTSGATPAAIRKLYQVKGKKNIRATERALSWDSFNTGDCFILDLGQNIFAWCGGKSNILERNKARDLALAIRDSERQGKAQVEIITDGEEPAEMIQVLGPKPALKEGNPEEDITADQTNAQAAALYKVSDATGQMNLTKVADSSPFASELLIPDDCFVLDNGLCGKIYIWKGRKANEKERQAALQVADGFISRMRYSPNTQVEILPQGRESPIFKQFFKNWK

SEQ ID NO: 191 - protein, 6 aa, Cricetulus griseus
RFDEGK

SEQ ID NO: 192 - protein, 6 aa, Cricetulus griseus
HLYDPK

SEQ ID NO: 193 - protein, 6 aa, Cricetulus griseus
DIYDQK

SEQ ID NO: 194 - protein, 8 aa, Cricetulus griseus
LQPGSVKK

SEQ ID NO: 195 - protein, 7 aa, Cricetulus griseus
RHLYDPK

SEQ ID NO: 196 - protein, 9 aa, Cricetulus griseus
GMSVYGLGR

SEQ ID NO: 197 - protein, 9 aa, Cricetulus griseus
GMSVYGLGR

SEQ ID NO: 198 - protein, 11 aa, Cricetulus griseus
GPSYGLSAEVK

SEQ ID NO: 199 - protein, 11 aa, Cricetulus griseus
GFHTTIDIGVK

SEQ ID NO: 200 - protein, 13 aa, Cricetulus griseus
GASQAGMLAPGTR

SEQ ID NO: 201 - protein, 13 aa, Cricetulus griseus
GASQAGMLAPGTR

SEQ ID NO: 202 - protein, 13 aa, Cricetulus griseus
CASQAGMTAYGTR

SEQ ID NO: 203 - protein, 13 aa, Cricetulus griseus
CASQAGMTAYGTR

SEQ ID NO: 204 - protein, 14 aa, Cricetulus griseus
AGQSVIGLQMGTNK

SEQ ID NO: 205 - protein, 14 aa, Cricetulus griseus
AGQSVIGLQMGTNK

SEQ ID NO: 206 - protein, 330 aa, Mus musculus
MTHFNKGPSYGLSAEVKNKIASKYDQQAEEDLRNWIEEVTGLGIGTNFQLGLKDGIILCELINKLQPGSVKKVNESSLNWPQLENIGNFIKAIQAYGMKPHDIFEANDLFENGNMTQVQTTLVALAGLAKTKGFHTTIDIGVKYAEKQTRRFDEGKLKAGQSVIGLQMGTNKCASQAGMTAYGTRRHLYDPKMQTDKPFDQTTISLQMGTNKGASQAGMLAPGTRRDIYDQKLTLQPVDNSTISLQMGTNKVASQKGMSVYGLGRQVYDPKYCAAPTEPVIHNGSQGTGTNGSEISDSDYQAEYPDEYHGEYPDDYPREYQYGDDQGIDY

SEQ ID NO: 207 - protein, 6 aa, Cricetulus griseus
GVPLYR

SEQ ID NO: 208 - protein, 6 aa, Cricetulus griseus
EIFDSR

SEQ ID NO: 209 - protein, 6 aa, Cricetulus griseus
YDLDFK

SEQ ID NO: 210 - protein, 7 aa, Cricetulus griseus
EALELLK

SEQ ID NO: 211 - protein, 9 aa, Cricetulus griseus
SGKYDLDFK

SEQ ID NO: 212 - protein, 9 aa, Cricetulus griseus
KVNVVEQEK

SEQ ID NO: 213 - protein, 10 aa, Cricetulus griseus
IGAEVYHNLK

SEQ ID NO: 214 - protein, 13 aa, Cricetulus griseus
YDLDFKSPDDPSR

SEQ ID NO: 215 - protein, 19 aa, Cricetulus griseus
DATNVGDEGGFAPNILENK

SEQ ID NO: 216 - protein, 458 aa, Mus musculus
LRLSSVSTAPSFLALQRSYCQKFAMSILRIHAREIFDSRGNPTVEVDLYTAKGLFRAAVPSGASTGIYEALELRDNDKTRFMGKGVSQAVEHINKTIAPALVSKKVNVVEQEKIDKLMIEMDGTENKSKFGANAILGVSLAVCKAGAVEKGVPLYRHIADLAGNPEVILPVPAFNVINGGSHAGNKLAMQEFMILPVGASSFREAMRIGAEVYHNLKNVIKEKYGKDATNVGDEGGFAPNILENKEALELLKTAIAKAGYTDQVVIGMDVAASEFYRSGKYDLDFKSPDDPSRYITPDQLADLYKSFVQNYPVVSIEDPFDQDDWGAWQKFTASAGIQVVGDDLTVTNPKRIAKAASEKSCNCLLLKVNQIGSVTESLQACKLAQSNGWGVMVSHRSGETEDTFIADLVVGLCTGQIKTGAPCRSERLAKYNQILRIEEELGSKAKFAGRSFRNPLAK

SEQ ID NO: 217 - protein, 8 aa, Cricetulus griseus
LAGVPDPK

SEQ ID NO: 218 - protein, 7 aa, Cricetulus griseus
LPLENGR

SEQ ID NO: 219 - protein, 10 aa, Cricetulus griseus
LGFITNNSSK

SEQ ID NO: 220 - protein, 10 aa, Cricetulus griseus
QRLAGVPDPK

SEQ ID NO: 221 - protein, 10 aa, Cricetulus griseus
QADIIGKPSR

SEQ ID NO: 222 - protein, 10 aa, Cricetulus griseus
FIAGTGCLVR

SEQ ID NO: 223 - protein, 11 aa, Cricetulus griseus
RLGFITNNSSK

SEQ ID NO: 224 - protein, 13 aa, Cricetulus griseus
GETAVPGAPETLR

SEQ ID NO: 225 - protein, 14 aa, Cricetulus griseus
AVVVGFDPHFSYMK

SEQ ID NO: 226 - protein, 17 aa, Cricetulus griseus
YLQQPDCLLVGTNMDNR

SEQ ID NO: 227 - protein, 321 aa, Rattus norvegicus
MAEAEAGGDEVRCVRLSAERAKLLLAEVDTLLFDCDGVLWRGETAVPGAPETLRALRARGKRLGFITNNSSKTRTAYAEKLRRLGFGGPMGPEAGLEVFGTAYCSALYLRQRLAGVPDPKAYVLGSPALAAELEAVGVTSVGVGPDVLHGDGPSDWLAVPLEPDVRAVVVGFDPHFSYMKLTKAVRYLQQPDCLLVGTNMDNRLPLENGRFIAGTGCLVRAVEMAAQRQADIIGKPSRFIFDCVSQEYGINPERTVMVGDRLDTDILLGSTCSLKTILTLTGVSSLEDVKSNQESDCMFKKKMVPDFYVDSIADLLPALQG

SEQ ID NO: 228 - protein, 6 aa, Cricetulus griseus
FLEGVR

SEQ ID NO: 229 - protein, 6 aa, Cricetulus griseus
LLPHIR

SEQ ID NO: 230 - protein, 6 aa, Cricetulus griseus
SNYFLK

SEQ ID NO: 231 - protein, 6 aa, Cricetulus griseus
QMQQIR

SEQ ID NO: 232 - protein, 6 aa, Cricetulus griseus
QMQQIR

SEQ ID NO: 233 - protein, 9 aa, Cricetulus griseus
GNVGFVFTK

SEQ ID NO: 234 - protein, 10 aa, Cricetulus griseus
IIQLLDDYPK

SEQ ID NO: 235 - protein, 11 aa, Cricetulus griseus
GHLENNPALEK

SEQ ID NO: 236 - protein, 12 aa, Cricetulus griseus
CFIVGADNVGSK

SEQ ID NO: 237 - protein, 13 aa, Cricetulus griseus
DMLLANKVPAAAR

SEQ ID NO: 238 - protein, 22 aa, Cricetulus griseus
AGAIAPCEVTVPAQNTGLGPEK

SEQ ID NO: 239 - protein, 309 aa, Bos taurus
KSNYFLKIIQLLDDYPKCFIVGADNVGSKQMQQIRMSLRGKAVVLMGKNTMMRKAIRGHLENNPALEKLLPHIRGNVGFVFTKEDLTEIRDMLLANKVPAAARAGAIAPCEVTVPAQNTGLGPEKTSFFQALGITTKISRGTIEILSDVQLIKTGDKEGASEATLLNMLNISPFSFGLVIQQVFDNGSIYNPEVLDITEETLHSRFLEGVRNVASVCLQIGYPTVASVPHSIINGYKRVLALSVETDYTFPLAEKVKAFLADPSAFVAAAPVAAAPAAAPAATTAAPAKVEAKEESEESDEDMGFGLFD

SEQ ID NO: 240 - protein, 8 aa, Cricetulus griseus
GPLGPNWK

SEQ ID NO: 241 - protein, 7 aa, Cricetulus griseus
LFTNFHR

SEQ ID NO: 242 - protein, 8 aa, Cricetulus griseus
RLFTNFHR

SEQ ID NO: 243 - protein, 9 aa, Cricetulus griseus
AWNAYPYCR

SEQ ID NO: 244 - protein, 11 aa, Cricetulus griseus
HVEAVYDIADR

SEQ ID NO: 245 - protein, 270 aa, Homo sapiens
  misc_feature (1)..(1): Xaa can be any naturally occurring amino acid
  misc_feature (74)..(74): Xaa can be any naturally occurring amino acid
  misc_feature (103)..(103): Xaa can be any naturally occurring amino acid
  misc_feature (190)..(190): Xaa can be any naturally occurring amino acid
  misc_feature (240)..(240): Xaa can be any naturally occurring amino acid
  misc_feature (246)..(246): Xaa can be any naturally occurring amino acid
  misc_feature (257)..(257): Xaa can be any naturally occurring amino acid
  misc_feature (266)..(266): Xaa can be any naturally occurring amino acid
XVLLKEYRVILPVSVDEYQVGQLYSVAEASKNETGGGEGVEVLVNEPYEKDGEKGQYTHKIYHLQSKVPTFVRXLAPEGALNIHEKAWNAYPYCRTVITNEYXKEDFLIKIETWHKPDLGTQENVHKLEPEAWKHVEAVYIDIADRSQVLSKDYKAEEDPAKFKSIKTGRGPLGPNWKQELVNQKDCPYXCAYKLVTVKFKWWGLQNKVENFIHKQERRLFTNFHRQLFCWLDKWVDLTXDDIRRXEEETKRQLDEXRQKDPVKGXTADD

SEQ ID NO: 246 - protein, 5 aa, Cricetulus griseus
LDHNR

SEQ ID NO: 247 - protein, 6 aa, Cricetulus griseus
REGMER

SEQ ID NO: 248 - protein, 6 aa, Cricetulus griseus
REGMER

SEQ ID NO: 249 - protein, 7 aa, Cricetulus griseus
ANVKIFK

SEQ ID NO: 250 - protein, 7 aa, Cricetulus griseus
AICDHVR

SEQ ID NO: 251 - protein, 8 aa, Cricetulus griseus
ENFSCLTR

SEQ ID NO: 252 - protein, 10 aa, Cricetulus griseus
GEFVTTVQQR

SEQ ID NO: 253 - protein, 12 aa, Cricetulus griseus
FVEGLPINDFSR

SEQ ID NO: 254 - protein, 13 aa, Cricetulus griseus
DVIATDKEEVAFK

SEQ ID NO: 255 - protein, 17 aa, Cricetulus griseus
VIVVGNPANTNCLTASK

SEQ ID NO: 256 - protein, 20 aa, Cricetulus griseus
NVIIWGHNSSTQYPDVNHAK

SEQ ID NO: 257 - protein, 334 aa, Rattus norvegicus
MSEPIRVLVTGAAGQIAYSLLYSIGNGSVFGKDQPIILVLLDITPMMGVLDGVLMELQDCALPLLQDVIATDKEEVAFKDLDVAVLVGSMPRREGMERKDLLKANVKIFKSQGAALEKYAKKSVKVIVVGNPANTNCLTASKSAPSIPKENFSCLTRLDHNRAKSQIALKLGVTADDVKNVIIWGNHSSTQYPDVNHAKVKLQGKEVGVYEALKDDSWLKGEFITTVQQRGAAVIKARKLSSAMSAAKAISDHIRDIWFGTPEGEFVSMGVISDGNSYGVPDDLLYSFPVVIKNKTWKFVEGLPINDFSREKMDLTAKELTEEKETAFEFLSSA

SEQ ID NO: 258 - protein, 5 aa, Cricetulus griseus
LREER

SEQ ID NO: 259 - protein, 5 aa, Cricetulus griseus
EERLR

SEQ ID NO: 260 - protein, 5 aa, Cricetulus griseus
IWFDK

SEQ ID NO: 261 - protein, 6 aa, Cricetulus griseus
YDDAER

SEQ ID NO: 262 - protein, 7 aa, Cricetulus griseus
ARENIQK

SEQ ID NO: 263 - protein, 8 aa, Cricetulus griseus
QVEPPTKK

SEQ ID NO: 264 - protein, 9 aa, Cricetulus griseus
LVPVGYGIR

SEQ ID NO: 265 - protein, 7 aa, Cricetulus griseus
IWFDKFK

SEQ ID NO: 266 - protein, 8 aa, Cricetulus griseus
FKYDDAER

SEQ ID NO: 267 - protein, 10 aa, Cricetulus griseus
QENGASVILR

SEQ ID NO: 268 - protein, 13 aa, Cricetulus griseus
ATAPQTQHVSPMR

SEQ ID NO: 269 - protein, 14 aa, Cricetulus griseus
FYEQMNGPVTSGSR

SEQ ID NO: 270 - protein, 24 aa, Cricetulus griseus
SLAGSSGPGASSGPGGDHSELIVR

SEQ ID NO: 271 - protein, 281 aa, Mus musculus
MATNFLAHEKIWFDKFKYDDAERRFYEQMNGPVTSGSRQENGASVILRDIARARENIQKSLAGSSGPGASSGPGGDHSELIVRITSLEVENQNLRGVVQDLQQAISKLEARLSSLEKSSPTPRATAPQTQHVSPMRQVEPPTKKGATPAEDDEDKDIDLFGSDEEEEDKEAARLREERLRQYAEKKAKKPTLVAKSSILLDVKPWDDETDMAQLETCVRSIQLDGLVWGASKLVPVGYGIRKLQIQCVVEDDKVGTDLLEEEITKFEEHVQSVDIAAFDKI

SEQ ID NO: 272 - protein, 5 aa, Cricetulus griseus
HCGLR

SEQ ID NO: 273 - protein, 6 aa, Cricetulus griseus
VTFPVR

SEQ ID NO: 274 - protein, 10 aa, Cricetulus griseus
VFGFSLITNK

SEQ ID NO: 275 - protein, 10 aa, Cricetulus griseus
FPAMSDAYDR

SEQ ID NO: 276 - protein, 9 aa, Cricetulus griseus
FPAMSDADR

SEQ ID NO: 277 - protein, 19 aa, Cricetulus griseus
MLGADAVGMSTVPEVIVAR

SEQ ID NO: 278 - protein, 19 aa, Cricetulus griseus
MLGADAVGMSTVPEVIVAR

SEQ ID NO: 279 - protein, 19 aa, Cricetulus griseus
MLGADAVGMSTVPEVIVAR

SEQ ID NO: 280 - protein, 19 aa, Cricetulus griseus
ANHMEVLDAGKAAAQTLER

SEQ ID NO: 281 - protein, 19 aa, Cricetulus griseus
ANHMEVLDAGKAAAQTLER

SEQ ID NO: 282 - protein, 22 aa, Cricetulus griseus
AAAQTLERFVSILMESIPLPDR

SEQ ID NO: 283 - protein, 289 aa, Mus spretus
MENEFTYEDYETTAKWLLQHTKYRPQVAVICGSGLGGLAAHLKEAQIFDYNEIPNFPQSTVQGHAGRLVFGLLNGRCCVMMQGRFHMYEGYSLSKVTFPVRVFHLLGVETLVVTNAAGGLNPNFEVGDIMLIRDHINLPGFCGQNPLRGPNEERFGVRFPAMSDAYDRDMRQKAFTAWKQMGEQRKLQEGTYVMLAGPNFETVAESRLLKMLGADAVGMSTVPEVIVARHCGLRVFGFSLITNKVVMDYENLEKANHMEVLDAGKAAAQTLERFVSILMESIPLPDRGS

SEQ ID NO: 284 - protein, 6 aa, Cricetulus griseus
GAFSPR

SEQ ID NO: 285 - protein, 6 aa, Cricetulus griseus
EVALLR

SEQ ID NO: 286 - protein, 7 aa, Cricetulus griseus
EVALLRR

SEQ ID NO: 287 - protein, 9 aa, Cricetulus griseus
LMDVCATAR

SEQ ID NO: 288 - protein, 11 aa, Cricetulus griseus
LEAFEHPNVVR

SEQ ID NO: 289 - protein, 13 aa, Cricetulus griseus
ARDPHSGHFVALK

SEQ ID NO: 290 - protein, 12 aa, Cricetulus griseus
RLEAFEHPNVVR

SEQ ID NO: 291 - protein, 17 aa, Cricetulus griseus
VPNGGGAGGGLPISTVR

SEQ ID NO: 292 - protein, 15 aa, Cricetulus griseus
IFDLIGLPPEDDWPR

SEQ ID NO: 293 - protein, 16 aa, Cricetulus griseus
RKPLFCGNSEADQLGK

SEQ ID NO: 294 - protein, 247 aa, Canis familiaris
MATPRYEPVAEIGVGAYGTVYKARDPHSGHFVALKSVRVPNGGGAGGGLPISTVREVALLRRLEAFEHPNVVRLMDVCATARTDRETKVTLVFEHVDQDLRTYLDKAPPPGLPVETIKVVTLWYRAPEVLLQSTYATPVDMWSVGCIFAEMFRRKPLFCGNSEADQLGKIFDLIGLPPEDDWPRDVSLPRGAFSPRGPRPVQTVVPEMEESGAQLLLEMLTFNPHKRISAFRALQHSYLQKAEGNPE

SEQ ID NO: 295 - protein, 5 aa, Cricetulus griseus
IQLQR

SEQ ID NO: 296 - protein, 5 aa, Cricetulus griseus
RVFWK

SEQ ID NO: 297 - protein, 7 aa, Cricetulus griseus
EPRPFPK

SEQ ID NO: 298 - protein, 8 aa, Cricetulus griseus
IQDANGSR

SEQ ID NO: 299 - protein, 9 aa, Cricetulus griseus
IIMCAWNPK

SEQ ID NO: 300 - protein, 9 aa, Cricetulus griseus
IIMCAWNPK

SEQ ID NO: 301 - protein, 11 aa, Cricetulus griseus
DFLDSLGFSAR

SEQ ID NO: 302 - protein, 14 aa, Cricetulus griseus
TGTGTLSVFGMQAR

SEQ ID NO: 303 - protein, 14 aa, Cricetulus griseus
TGTGTLSVFGMQAR

SEQ ID NO: 304 - protein, 307 aa, Mus musculus
MLVVGSELQSDAQQLSAEAPQHGELQYLRQVEHILRCGFKKEDRTGTGTLSVFGMQARYSLRDEFPLLTTKRVFWKGVLEELLWFIKGSTNAKELSSKGVRIWDANGSRDFLDSLGFSARQEGDLGPVYGFQWRHFGAEYKDMDSDYSGQGVDQLQKVIDTIKTNPDDRRIIMCAWNPKDLPLMALPPCHALCQFYVVNGELSCQLYQRSGDMGLGVPFNIASYALLTYMIAHITGLQPGDFVHTLGDAHIYLNHIEPLKIQLQREPRPFPKLKILRKVETIDDFKVEDFQIEGYNPHPTIKMEMAV

SEQ ID NO: 305 - protein, 6 aa, Cricetulus griseus
AEFAER

SEQ ID NO: 306 - protein, 6 aa, Cricetulus griseus
YEEVAR

SEQ ID NO: 307 - protein, 8 aa, Cricetulus griseus
HIAEEADR

SEQ ID NO: 308 - protein, 9 aa, Cricetulus griseus
HIAEEADRK

SEQ ID NO: 309 - protein, 10 aa, Cricetulus griseus
IQLVEEELDR

SEQ ID NO: 310 - protein, 227 aa, Canis familiaris
MAGITTIEAVKRKIQVLQQQADDAEERAERLQREVEGERRAREQAEAEVASLNRRIQLVEEELDRAQERLATALQKLEEAEKAADESERGMKVIENRALKDEEKMELQEIQLKEAKHIAEEADRKYEEVARKLVIIEGDLERTEERAELAESRCREMDEQIRLMDQNLKCLSAAEEKAETRAEFAERSVAKLEKTIDDLEDKLKCTKEEHLCTQRMLDQTLLDLNEM

SEQ ID NO: 311 - protein, 7 aa, Cricetulus griseus
YIQHTYR

SEQ ID NO: 312 - protein, 11 aa, Cricetulus griseus
TDYMVGSYGPR

SEQ ID NO: 313 - protein, 14 aa, Cricetulus griseus
IDKTDYMVGSYGPR

SEQ ID NO: 314 - protein, 16 aa, Cricetulus griseus
VAVSADPNVPNVIVTR

SEQ ID NO: 315 - protein, 15 aa, Cricetulus griseus
AEEYEFLTPMEEAPK

SEQ ID NO: 316 - protein, 16 aa, Cricetulus griseus
SIQEIQELDKDDESLR

SEQ ID NO: 317 - protein, 204 aa, Mus musculus
MAEQEPTAEQLAQIAAENEEDEHSVNYKPPAQKSIQEIQELDKDDESLRKYKEALLGRVAVSADPNVPNVIVTRLTLVCSTAPGPLELDLTGDLESFKKQSFVLKEGVEYRIKISFRVNREIVSGMKYIQHTYRKGVKIDKTDYMVGSYGPRAEEYEFLTPMEEAPKGMLARGSYNIKSRFTDDDKTDHLSWEWNLTIKKEWKD

SEQ ID NO: 318 - protein, 7 aa, Cricetulus griseus
VPFSLLR

SEQ ID NO: 319 - protein, 9 aa, Cricetulus griseus
EGVVEITGK

SEQ ID NO: 320 - protein, 8 aa, Cricetulus griseus
RVPFSLLR

SEQ ID NO: 321 - protein, 8 aa, Cricetulus griseus
SPSWEPFR

SEQ ID NO: 322 - protein, 8 aa, Cricetulus griseus
DWYPAHSR

SEQ ID NO: 323 - protein, 10 aa, Cricetulus griseus
QLSSGVSEIR

SEQ ID NO: 324 - protein, 9 aa, Cricetulus griseus
QDEHGYISR

SEQ ID NO: 325 - protein, 10 aa, Cricetulus griseus
LFDQAFGVPR

SEQ ID NO: 326 - protein, 13 aa, Cricetulus griseus
EGVVEITGKHEER

SEQ ID NO: 327 - protein, 13 aa, Cricetulus griseus
HEERQDEHGYISR

SEQ ID NO: 328 - protein, 16 aa, Cricetulus griseus
VSLDVNHFAPEELTVK

SEQ ID NO: 329 - protein, 205 aa, Rattus norvegicus
MTERRVPFSLLRSPSWEPFRDWYPAHSRLFDQAFGVPRFPDEWSQWFSSAGWPGYVRPLPAATAEGPAAVTLARPFSRALNRQLSSGVSEIRQTADRWRVSLDVNHFAPEELTVKTKEGVVEITGKHEERQDEHGYISRCFTRKYTLPPGVDPTLVSSSLSPEGTLTVEAPLPKAVTQSAEITIPVTFEARAQIGGPESEQSGAK

SEQ ID NO: 330 - protein, 5 aa, Cricetulus griseus
VWEIK

SEQ ID NO: 331 - protein, 8 aa, Cricetulus griseus
IEEQKPER

SEQ ID NO: 332 - protein, 10 aa, Cricetulus griseus
GKIEEQKPER

SEQ ID NO: 333 - protein, 13 aa, Cricetulus griseus
VKPFMTGAAEQIK

SEQ ID NO: 334 - protein, 165 aa, Rattus norvegicus
MRRYSLTSIYKVWEIKEGLCLEVEGKMFSRTEGAIDDLLIGGNASLEGSEGERTESPAVTSVDIVMNHHLQETSFTEEAYKKYIKDYMKSLKGKIEEQKPERVKPFMTGAAEQIKHILANFNKYQFFISENMNPDGMVALLDYHEDGVTLLMFFFKDSLEMEKKC

SEQ ID NO: 335 - protein, 7 aa, Cricetulus griseus
LLASHLK

SEQ ID NO: 336 - protein, 10 aa, Cricetulus griseus
IDYIAGLDSR

SEQ ID NO: 337 - protein, 13 aa, Cricetulus griseus
DISPLLKDPASFR

SEQ ID NO: 338 - protein, 15 aa, Cricetulus griseus
AELEIQKDALEPGQK

SEQ ID NO: 339 - protein, 16 aa, Cricetulus griseus
STHGGKIDYIAGLDSR

SEQ ID NO: 340 - protein, 18 aa, Cricetulus griseus
GKLPGPTVSASYALEYGK

SEQ ID NO: 341 - protein, 180 aa, Cricetulus longicaudatus
MAESELQLVAQRIRSFPDFPIPGVLFRDISPLLKDPASFRASIRLLASHLKSTHGGKIDYIAGLDSRGFLFGPSLAQELGLGCVLIRKRGKLPGPTVSASYALEYGKAELEIQKDALEPGQKVVVVDDLLATGGTMCAACELLGQLQAEVVECVSLVELTSLKGREKLGSVPFFSLLQYE

SEQ ID NO: 342 - protein, 8 aa, Cricetulus griseus
LPDGHEFK

SEQ ID NO: 343 - protein, 12 aa, Cricetulus griseus
DSNNLCLHFNPR

SEQ ID NO: 344 - protein, 15 aa, Cricetulus griseus
FNAHGDANTIVCNSK

SEQ ID NO: 345 - protein, 16 aa, Cricetulus griseus
LNMEAINYMAADGDFK

SEQ ID NO: 346 - protein, 135 aa, Cricetulus griseus
MACGLVASNLNLKPGECLKVRGEVAPDAKSFVLNLGKDSNNLCLHFNPRFNAHGDANTIVCNSKDNGAWGTEHREPAFPFQPGSTVEVCITFDQADLTIKLPDGHEFKFPNRLNMEAINYMAADGDFKIKCVAFE

SEQ ID NO: 347 - protein, 6 aa, Cricetulus griseus
VEPPLR

SEQ ID NO: 348 - protein, 6 aa, Cricetulus griseus
VLTFYR

SEQ ID NO: 349 - protein, 8 aa, Cricetulus griseus
NTVQGFKR

SEQ ID NO: 350 - protein, 8 aa, Cricetulus griseus
VTYMEEER

SEQ ID NO: 351 - protein, 9 aa, Cricetulus griseus
FQESEERPK

SEQ ID NO: 352 - protein, 11 aa, Cricetulus griseus
GSVSCLGGRTR

SEQ ID NO: 353 - protein, 11 aa, Cricetulus griseus
AFSDPFVEAEK

SEQ ID NO: 354 - protein, 11 aa, Cricetulus griseus
QDLPALEEKPR

SEQ ID NO: 355 - protein, 13 aa, Cricetulus griseus
VLATAFDTTLGGR

SEQ ID NO: 356 - protein, 11 aa, Cricetulus griseus
NAVEEYVYEMR

SEQ ID NO: 357 - protein, 14 aa, Cricetulus griseus
AGGIETIANEYSDR

SEQ ID NO: 358 - protein, 13 aa, Cricetulus griseus
VEPPLRSVLEQTK

SEQ ID NO: 359 - protein, 13 aa, Cricetulus griseus
FVSEDDRNSFTLK

SEQ ID NO: 360 - protein, 782 aa, Homo sapiens
PRRGSVSCLGGRTRARARAVAGAMSVVGIDLGFQSCYVAVARAGGIETIANEYSDRCTPACISFGPKNRSIGAAAKSQVISNAKNTVQGFKRFHGRAFSDPFVEAEKSNLAYDIVQLPTGLTGIKVTYMEEERNFTTEQVTAMLLSKLKETAESVLKKPVVDCVVSVPCFYTDAERRSVMDATQIAGLNCLRLMNETTAVALAYGIYKQDLPALEEKPRNVVFVDMGHSAYQVSVCAFNRGKLKVLATAFDTTLGGRKFDEVLVNHFCEEFGKKYKLDIKSKIRALLRLSQECEKLKKLMSANASDLPLSIECFMNDVDVSGTMNRGKFLEMCNDLLARVEPPLRSVLEQTKLKKEDIYAVEIVGGATRIPAVKEKISKFFGKELSTTLNADEAVTRGCALQCAILSPAFKVREFSITDVVPYPISLRWNSPAEEGSSDCEVFSKNHAAPFSKVLTFYRKEPFTLEAYYSSPQDLPYPDPAIAQFSVQKVTPQSDGSSSKVKVKVRVNVHGIFSVSSASLVEVHKSEENEEPMETDQNAKEEEKMQVDQEEPHVEEQQQQTPAENKAESEEMETSQAGSKDKKMDQPPQAKKAKVKTSTVDLPIENQLLWQIDREMLNLYIENEGKMIMQDKLEKERNDAKNAVEEYVYEMRDKLSGEYEKFVSEDDRNSFTLKLEDTENWLYEDGEDQPKQVYVDKLAELKNLGQPIKIRFQESEERPKLFEELGKQIQQYMKIISSFKNKEDQYDHLDAADMTKVEKSTNEAMEWMNNKLNLQNKQSLTM

SEQ ID NO: 361 - protein, 6 aa, Cricetulus griseus
AIQGLR

SEQ ID NO: 362 - protein, 6 aa, Cricetulus griseus
VGDQVR

SEQ ID NO: 363 - protein, 6 aa, Cricetulus griseus
FDFTAK

SEQ ID NO: 364 - protein, 7 aa, Cricetulus griseus
ALNEALK

SEQ ID NO: 365 - protein, 7 aa, Cricetulus griseus
VLADHAR

SEQ ID NO: 366 - protein, 8 aa, Cricetulus griseus
GSLVAPDR

SEQ ID NO: 367 - protein, 7 aa, Cricetulus griseus
LFIDEPR

SEQ ID NO: 368 - protein, 8 aa, Cricetulus griseus
KVMDDLDR

SEQ ID NO: 369 - protein, 8 aa, Cricetulus griseus
KVMDDLDR

SEQ ID NO: 370 - protein, 10 aa, Cricetulus griseus
GTGARPYTGK

SEQ ID NO: 371 - protein, 10 aa, Cricetulus griseus
SIDTGMGLER

SEQ ID NO: 372 - protein, 10 aa, Cricetulus griseus
IVAVTGAEQK

SEQ ID NO: 373 - protein, 10 aa, Cricetulus griseus
SIDTGMGLER

SEQ ID NO: 374 - protein, 11 aa, Cricetulus griseus
ETDGLLKPLPK

SEQ ID NO: 375 - protein, 11 aa, Cricetulus griseus
AQTAPNKDVQR

SEQ ID NO: 376 - protein, 12 aa, Cricetulus griseus
RIVAVTGAEAQK

SEQ ID NO: 377 - protein, 12 aa, Cricetulus griseus
AVFDETYPDPVR

SEQ ID NO: 378 - protein, 14 aa, Cricetulus griseus
VGAEDADGIDMAYR

SEQ ID NO: 379 - protein, 14 aa, Cricetulus griseus
VGAEDADGIDMAYR

SEQ ID NO: 380 - protein, 14 aa, Cricetulus griseus
VDDSSEDKTEFTVK

SEQ ID NO: 381 - protein, 14 aa, Cricetulus griseus
ITCLCQVPQNAANR

SEQ ID NO: 382 - protein, 17 aa, Cricetulus griseus
TITVALADGGRPDNTGR

SEQ ID NO: 383 - protein, 968 aa, Mesocricetus auratus
MDSPLTAREIRERFINFFRRNEHTYVHSSATIPLDDPTLLFANAGMNQFKPIFLNTIDPSHPLAKLSRAANTQKCIRAGGKHNDLDDVGKDVYHHTFFEMLGSWSFGDYFKELACKMALELLTQEFAIPVERLYVTYFGGDEAAGLEPDLECKQIWQNLGLDDAKILPGNMKDNFWEMGDTGPCGPCSEIHYDRIGGRDAAHLVNQDDPNVLEIWNLVFIQYNRETDGLLKPLPKKSIDTGMGLERLVSVLQNKMSNYDTDLFVPYFEAIQKGTGARPYTGKVGAEDADGIDMAYRVLADHARTITVALADGGRPDNTGRGYVLRRILRRAVRYSHEKLNASRGFFATLVDVVVQSLGDAFPELKKDPDMVKDIINEEEVQFLKTLSRGRRILDRKIQSLGDCKTIPGDTAWLLYDTYGFPVDLTGLIAEEKGLVVDMDGFEEERKLAQLKSQGKGAGGEDLIMLDIYAIEELRAKGLEATDDSPKYNYHSDSSGAYVFECTVATVLALRREKMFVEEVVTGQECGVVLDKTCFYAEQGGQIYDEGYLVKVDDSSEDKTEFTVKNAQVRGGYVLHIGTIYGNLKVGDQVRLFIDEPRRRPVMSNHTATHILNFALRSVLGEADQKGSLVAPDRLRFDFTAKGAMSTQQIKEAEEIVNAMIEAAKPVYTQDCPLAAAKAIQGLRAVFDETYPDPVRVVSIGVPVSELLDDPSGPAGSLTSVEFCGGTHLQNSSHAGAFVIVTEEAIAKGIRRIVAVTGAEAQKALRKAESLRRSLSIMEAKVKAQTAPNKDVQREIADLGEALATAVIPQWQKDEQRETLKSLKKVMDDLDRASKADVQKRVLEKTKQLIDSNPNQPLVILEMESGASAKALNEALKLFKTHSPQTSAMLFTVDNEAGKITCLCQVPQNAANRGLKASEWVQQVSGLMDGKGGGKDVSAQATGKNVGCLQEALQLATSFAQLRLGAVEN

SEQ ID NO: 384 - protein, 6 aa, Cricetulus griseus
LNLKPR

SEQ ID NO: 385 - protein, 7 aa, Cricetulus griseus
AFGSGYR

SEQ ID NO: 386 - protein, 8 aa, Cricetulus griseus
GQTGHSSR

SEQ ID NO: 387 - protein, 6 aa, Cricetulus griseus
YRDGYR

SEQ ID NO: 388 - protein, 8 aa, Cricetulus griseus
GLNISAVR

SEQ ID NO: 389 - protein, 7 aa, Cricetulus griseus
ENAWVKR

SEQ ID NO: 390 - protein, 7 aa, Cricetulus griseus
LQKEQEK

SEQ ID NO: 391 - protein, 8 aa, Cricetulus griseus
RAFGSGYR

SEQ ID NO: 392 - protein, 8 aa, Cricetulus griseus
AFGSGYRR

SEQ ID NO: 393 - protein, 9 aa, Cricetulus griseus
RGDDSFGDK

SEQ ID NO: 394 - protein, 7 aa, Cricetulus griseus
YEDRYDR

SEQ ID NO: 395 - protein, 9 aa, Cricetulus griseus
GGGDRYEDR

SEQ ID NO: 396 - protein, 10 aa, Cricetulus griseus
DDRGPPQRPK

SEQ ID NO: 397 - protein, 16 aa, Cricetulus griseus
AASIFGGAKPVDTAAR

SEQ ID NO: 398 - protein, 14 aa, Cricetulus griseus
ARPATDSFDDYPPR

SEQ ID NO: 399 - protein, 611 aa, Rattus norvegicus
MAASAKKKNKKGKTISLTDFLAEDGGTGGGSTYVPKPVSWADETDDLEGDVSTTWHSNDDDVYRAPPIDRSILPTAPRAAREPNIDRSRLPKSPPYTAFLGNLPYDVTEDSIKDFFRGLNISAVRLPREPSNPDRLKGFGYAEFEDLDSLLSALSLNEESLGNRRIRVDVADQAQDKDRDDRSFGRDRNRDSDKTDTDWRARPATDSFDDYPPRRGDDSFGDKYRDRYESDRYRDGYRDGYRDGPRRDMDRYGGRDRYDDRGSRDYDRGYDSRIGSGRRAFGSGYRRDDDYRGGGDRYEDRYDRRDDRSWSSRDDYSRDDYRRDDRGPPQRPKLNLKPRSTPKEDDSSASTSQSSRAASIFGGAKPVDTAAREREVEERLQKEQEKLQRQLDEPKLDRRPRERHPSWRSEETQERERSRTGSESSQTGTSATSGRNTRRRESEKSLENETLNKEEDCHSPTSKPPKPDQPLKVMPAPPPKENAWVKRSSNPPARSQSSDTEQPSPTSGGGKVAPAQPSEEGPSRKDETKVDGVSTTKGQTGHSSRGPGDGGSRDHWKELDRKDGKKDQDSRSAPEPKKSEENRASKFSSASKYAALSVDGEDEDEGDDCTE

SEQ ID NO: 400 - protein, 8 aa, Cricetulus griseus
RNTTIPTK

SEQ ID NO: 401 - protein, 9 aa, Cricetulus griseus
LLQDFFNGK

SEQ ID NO: 402 - protein, 12 aa, Cricetulus griseus
DAGTIAGLNVLR

SEQ ID NO: 403 - protein, 11 aa, Cricetulus griseus
VEIIANDQGNR

SEQ ID NO: 404 - protein, 10 aa, Cricetulus griseus
FEELNADLFR

SEQ ID NO: 405 - protein, 12 aa, Cricetulus griseus
RFDDAVVQSDMK

SEQ ID NO: 406 - protein, 14 aa, Cricetulus griseus
SQIHDIVLVGGSTR

SEQ ID NO: 407 - protein, 13 aa, Cricetulus griseus
TTPSYVAFTDTER

SEQ ID NO: 408 - protein, 16 aa, Cricetulus griseus
IINEPTAAAIAYGLDK

SEQ ID NO: 409 - protein, 16 aa, Cricetulus griseus
STAGDTHLGGEDFDNR

SEQ ID NO: 410 - protein, 18 aa, Cricetulus griseus
TVTNAVVTVPAYFNDSQR

SEQ ID NO: 411 - protein, 646 aa, Mus musculus
MSKGPAVGIDLGTTYSCVGVFQHGKVEIIANDQGNRTTPSYVAFTDTERLIGDAAKNQVAMNPTNTVFDAKRLIGRRFDDAVVQSDMKHWPFMVVNDAGRPKVQVEYKGETKSFYPEEVSSMVLTKMKEIAEAYLGKTVTNAVVTVPAYFNDSQRQATKDAGTIAGLNVLRIINEPTAAAIAYGLDKKVGAERNVLIFDLGGGTFDVSILTIEDGIFEVKSTAGDTHLGGEDFDNRMVNHFIAEFKRKHKKDISENKRAVRRLRTACERAKRTLSSSTQASIEIDSLYEGIDFYTSITRARFEELNADLFRGTLDPVEKALRDAKLDKSQIHDIVLVGGSTRIPKIQKLLQDFFNGKELNKSINPDEAVAYGAAVQAAILSGDKSENVQDLLLLDVTPLSLGIETAGGVMTVLIKRNTTIPTKQTQTFTTYSDNQPGVLIQVYEGERAMTKDNNLLGKFELTGIPPAPRGVPQIEVTFDIDANGILNVSAVDKSTGKENKITITNDKGRLSKEDIERMVQEAEKYKAEDEKQRDKVSSKNSLESYAFNMKATVEDEKLQGKINDEDKQKILDKCNEIISWLDKNQTAEEEEFEHQQKELEKVCNPIITKLYQSAGGMPGGMPGGFPGGGAPPSGGASSGPTIEEVD

SEQ ID NO: 412 - protein, 7 aa, Cricetulus griseus
QDEGVLK

SEQ ID NO: 413 - protein, 8 aa, Cricetulus griseus
FDSSLDRK

SEQ ID NO: 414 - protein, 8 aa, Cricetulus griseus
LYANMFER

SEQ ID NO: 415 - protein, 8 aa, Cricetulus griseus
LYANMFER

SEQ ID NO: 416 - protein, 10 aa, Cricetulus griseus
ESWEMSSAEK

SEQ ID NO: 417 - protein, 10 aa, Cricetulus griseus
FQIPPHAELR

SEQ ID NO: 418 - protein, 13 aa, Cricetulus griseus
EGTGTETPMIGDR

SEQ ID NO: 419 - protein, 13 aa, Cricetulus griseus
LQAFSAAIESCNK

SEQ ID NO: 420 - protein, 13 aa, Cricetulus griseus
LASHLNLAMCHLK

SEQ ID NO: 421 - protein, 15 aa, Cricetulus griseus
RGEAHLAVNDFDLAR

SEQ ID NO: 422 - protein, 21 aa, Cricetulus griseus
AAENGAQSAPLPLEGVDISPK

SEQ ID NO: 423 - protein, 458 aa, Mus musculus
MTAEEMKAAENGAQSAPLPLEGVDISPKQDEGVLKVIKREGTGTETPMIGDRVFVHYTGWLLDGTKFDSSLDRKDKFSFDLGKGEVIKAWDIAVATMKVGEVCHITCKPEYAYGAAGSPPKIPPNATLVFEVELFEFKGEDLTEEEDGGIIRRIRTRGEGYARPNDGAMVEVALEGYHKDRLFDQRELCFEVGEGESLDLPCGLEEAIQRMEKGEHSIVYLKPSYAFGSVGKERFQIPPHAELRYEVRLKSFEKAKESWEMSSAEKLEQSNIVKERGTAYFKEGKYKQALLQYKKIVSWLEYESSFSGEEMQKVRALRLASHLNLAMCHLKLQAFSAAIESCNKALELDSNNEKGLFRRGEAHLAVNDFDLARADFQKVLQLYPSNKAAKTQLAVCQQRTRRQLAREKKLYANMFERLAEEEHKVKAEVAAGDHPTDAEMKGERNNVAENQSRVETEA

SEQ ID NO: 424 - protein, 7 aa, Cricetulus griseus
VTLATLK

SEQ ID NO: 425 - protein, 8 aa, Cricetulus griseus
SKGQESFK

SEQ ID NO: 426 - protein, 8 aa, Cricetulus griseus
DLKPSTPR

SEQ ID NO: 427 - protein, 9 aa, Cricetulus griseus
GPSSVEDIK

SEQ ID NO: 428 - protein, 8 aa, Cricetulus griseus
ADKDYHFK

SEQ ID NO: 429 - protein, 13 aa, Cricetulus griseus
VDNDENEHQLSLR

SEQ ID NO: 430 - protein, 257 aa, Mus musculus
MEDSMDMDMSPLRPQNYLFGCELKADKDYHFKVDNDENEHQLSLRTVSLGAGAKDELHIVEAEAMNYEGSPIKVTLATLKMSVQPTVSLGGFEITPPVVLRLKCGSGPVHISGQHLVAVEEDAESEDEDEEDVKLLGMSGKRSAPGGGNKVPQKKVKLDEDDEDDDEDDEDDEDDDDDDFDEEETEEKVPVKKSVRDTPAKNAQKSNQNGKDLKPSTPRSKGQESFKKQEKTPKTPKGPSSVEDIKAKMQASIEKAH

SEQ ID NO: 431 - protein, 7 aa, Cricetulus griseus
YKEEFEK

SEQ ID NO: 432 - protein, 7 aa, Cricetulus griseus
YHEEFEK

SEQ ID NO: 433 - protein, 9 aa, Cricetulus griseus
TQDQISNIK

SEQ ID NO: 434 - protein, 10 aa, Cricetulus griseus
EPAAPVSIQR

SEQ ID NO: 435 - protein, 10 aa, Cricetulus griseus
QQSELQSQVR

SEQ ID NO: 436 - protein, 9 aa, Cricetulus griseus
ACFHCETCK

SEQ ID NO: 437 - protein, 10 aa, Cricetulus griseus
KPYCNAHYPK

SEQ ID NO: 438 - protein, 13 aa, Cricetulus griseus
MGPSGGEGIEPER

SEQ ID NO: 439 - protein, 13 aa, Cricetulus griseus
GFSVVADTPELQR

SEQ ID NO: 440 - protein, 12 aa, Cricetulus griseus
LKQQSELQSQVR

SEQ ID NO: 441 - protein, 14 aa, Cricetulus griseus
MGPSGGEGIEPERR

SEQ ID NO: 442 - protein, 14 aa, Cricetulus griseus
QSFTMVADTPENLR

SEQ ID NO: 443 - protein, 14 aa, Cricetulus griseus
QSFTMVADTPENLR

SEQ ID NO: 444 - protein, 263 aa, Rattus norvegicus
MNPNCARCGKIVYPTEKVNCLDKFWHKACFHCETCKMTLNMKNYKGYEKKPYCNAHYPKQSFTMVADTPENLRLKQQSELQSQVRYKEEFEKNKGKGFSVVADTPELQRIKKTQDQISNIKYHEEFEKSRMGPSGGEGIEPERREAQDSSSYRRPTEQQQPQPHHIPTSAPVYQQPQQQQVTPSYGGYKEPAAPVSIQRSAPGGGGKRYRAVYDYSAADEDEVSFQDGDTIVNVQQIDDGWMYGTVERTGDTGMLPANYVEAI

SEQ ID NO: 445 - protein, 8 aa, Cricetulus griseus
YHQIGSGK

SEQ ID NO: 446 - protein, 8 aa, Cricetulus griseus
GFGFVLFK

SEQ ID NO: 447 - protein, 8 aa, Cricetulus griseus
DLTEYLSR

SEQ ID NO: 448 - protein, 10 aa, Cricetulus griseus
FGEVVDCTIK

SEQ ID NO: 449 - protein, 13 aa, Cricetulus griseus
MFIGGLSWDTSKK

SEQ ID NO: 450 - protein, 14 aa, Cricetulus griseus
GFCFITYTDEEPVK

SEQ ID NO: 451 - protein, 16 aa, Cricetulus griseus
VFVGGLSPDTSEEQIK

SEQ ID NO: 452 - protein, 15 aa, Cricetulus griseus
GFCFITYTDEEPVKK

SEQ ID NO: 453 - protein, 17 aa, Cricetulus griseus
KVFVGGLSPDTSEEQIK

SEQ ID NO: 454 - protein, 301 aa, Mus musculus
MEDMNEYSNIEEFAEGSKINASKNQQDDGKMFIGGLSWDTSKKDLTEYLSRFGEVVDCTIKTDPVTGRSRGFGFVLFKDAASVDKVLELKEHKLDGKLIDPKRAKALKGKEPPKKVFVGGLSPDTSEEQIKEYFGAFGEIENIELPMDTKTNERRGFCFITYTDEEPVKKLLESRYHQIGSGKCEIKVAQPKEVYRQQQQQQKGGRGAAAGGRGGARGRGRGQGQNWNQGFNNYYDQGYGNYNSAYGGDQNYSGYGGYDYTGYNYGNYGYGQGYADYSGQQSTYGKASRGGGNHQNNYQPY

SEQ ID NO: 455 - protein, 6 aa, Cricetulus griseus
TPEELR

SEQ ID NO: 456 - protein, 8 aa, Cricetulus griseus
FITIFGTR

SEQ ID NO: 457 - protein, 9 aa, Cricetulus griseus
VLTEIIASR

SEQ ID NO: 458 - protein, 8 aa, Cricetulus griseus
LYDAYELK

SEQ ID NO: 459 - protein, 9 aa, Cricetulus griseus
SEIDLYNIR

SEQ ID NO: 460 - protein, 10 aa, Cricetulus griseus
LIVALMKPSR

SEQ ID NO: 461 - protein, 11 aa, Cricetulus griseus
GAGTDDHTLIR

SEQ ID NO: 462 - protein, 321 aa, Bos taurus
MAQVLRGTVADFPGFDERADAETLRKAMKGLGTDEETILTLLTSRSNAQRQEIAVAFKTLFGRDLLDDLKSELTGKFEKLIVALMKPSRLYDAYELKHALKGAGTDEKVLTEIIASRTPEELRAIEQVYEEEYGSSLEDDVVGDTSGYYQRMLVVLLQANRDPDARIDEAQVEQDAQALFQAGELKWGTDEEKFITIFGTRSVSHLRRVFDKYMTISGFQIEETIDRETSGNLEQLLLAVVKSIRSIPAYLAETLYYAMKGAGTDDHTLIRVVVSRSEIDLYNIRKEFRKNFGTSLYSMIKGDTSGDYKKALLLLCGGEDD

SEQ ID NO: 463 - protein, 10 aa, Cricetulus griseus
QPAGPGSGIR

SEQ ID NO: 464 - protein, 9 aa, Cricetulus griseus
GQVYPWGNR

SEQ ID NO: 465 - protein, 11 aa, Cricetulus griseus
FLMGTDAPDGR

SEQ ID NO: 466 - protein, 11 aa, Cricetulus griseus
FLMGTDAPDGR

SEQ ID NO: 467 - protein, 12 aa, Cricetulus griseus
LPTEEEWEFAAR

SEQ ID NO: 468 - protein, 15 aa, Cricetulus griseus
GASWIDTADGSANHR

SEQ ID NO: 469 - protein, 15 aa, Cricetulus griseus
MGNTPDSASDNLGFR

SEQ ID NO: 470 - protein, 15 aa, Cricetulus griseus
MGNTPDSASDNLGFR

SEQ ID NO: 471 - protein, 308 aa, Cricetulus griseus
MRSEFWFPSMGSLLPPVLLLWLLSCPRLQLGHAQDPAMVHLPGGRFLMGTDAPDGRDGEGPAREVTVKPFAIDIFPVTNKDFREFVREKKYQTEAEAFGWSFVFEDFVSPELRKQENLMPAVHWWQPVPKAFWRQPAGPGSGIREKLELPVVHVSWNDAGAYCAWRGRRLPTEEEWEFAARGGLKGQVYPWGNRFQPNRTNLWQGKFPKGDKAEDGFHGLSPVNAFPPQNNYGLYDLMGNVWEWTASTYQPAGQDMRVLRGASWIDTADGSANHRARVTTRMGNTPDSASDNLGFRCASSAGRPKEDL

SEQ ID NO: 472 - protein, 8 aa, Cricetulus griseus
HIAEEADR

SEQ ID NO: 473 - protein, 8 aa, Cricetulus griseus
EEHLCTQR

SEQ ID NO: 474 - protein, 9 aa, Cricetulus griseus
MELQEIQLK

SEQ ID NO: 475 - protein, 10 aa, Cricetulus griseus
LVIIEGDLER

SEQ ID NO: 476 - protein, 10 aa, Cricetulus griseus
IQLVEEELDR

SEQ ID NO: 477 - protein, 11 aa, Cricetulus griseus
KLVIIEGDLER

SEQ ID NO: 478 - protein, 12 aa, Cricetulus griseus
EQAEAEVASLNR

SEQ ID NO: 479 - protein, 14 aa, Cricetulus griseus
IQVLQQQADDAEER

SEQ ID NO: 480 - protein, 15 aa, Cricetulus griseus
KIQVLQQQADDAEER

SEQ ID NO: 481 - protein, 248 aa, Canis familiaris
MAGITTIEAVKRKIQVLQQQADDAEERAERLQREVEGERRAREQAEAEVASLNRRIQLVEEELDRAQERLATALQKLEEAEKAADESERGMKVIENRALKDEEKMELQEIQLKEAKHIAEEADRKYEEVARKLVIIEGDLERTEERAELAESKCSELEEELKNVTNNLKSLEAQAEKYSQKEDKYEEEIKILTDKLKEAETRAEFAERSVAKLEKTIDDLEDKLKCTKEEHLCTQRMLDQTLLDLNEM

SEQ ID NO: 482 - protein, 8 aa, Cricetulus griseus
FGGEVELR

SEQ ID NO: 483 - protein, 8 aa, Cricetulus griseus
FIVIADFR

SEQ ID NO: 484 - protein, 13 aa, Cricetulus griseus
VYFGMQDGSVNVR

SEQ ID NO: 485 - protein, 17 aa, Cricetulus griseus
MTPGVVDTGLFINMAER

SEQ ID NO: 486 - protein, 19 aa, Cricetulus griseus
NNQVLGIGSGSTIVHAVQR

SEQ ID NO: 487 - protein, 303 aa, Rattus norvegicus
MQRPGPFSTLYGRVLAPLPGRAGGAASGGGGNNWGLSGSHVQLPGRTQSETRGDKGGSSAGGPAPSTMSKAEEAKKLASHTAVENHVKNNQVLGIGSGSTIVHAVQRIAERVKQENLDLICIPTSFQARQLILQYGLTLSDLDQHPEIDLAIDGADEVDAELNLIKGGGGCLTQEKIVAGYASRFIVIADFRKDSKNLGDRWHKGIPIEVIPMAYVPVSRAVTQKFGGEVELRMAVNKAGPVVTDNGNFILDWKFDRVHKWGEVNTAIKMTPGVVDTGLFINMAERVYFGMQDGSVNVREKPF

SEQ ID NO: 488 - protein, 7 aa, Cricetulus griseus
ALVILAK

SEQ ID NO: 489 - protein, 8 aa, Cricetulus griseus
VTTHPGAK

SEQ ID NO: 490 - protein, 7 aa, Cricetulus griseus
DPVQCSR

SEQ ID NO: 491 - protein, 9 aa, Cricetulus griseus
EILKEQESR

SEQ ID NO: 492 - protein, 15 aa, Cricetulus griseus
DVMICPDTSLEDAKK

SEQ ID NO: 493 - protein, 15 aa, Cricetulus griseus
GAEEMETVIPVDIMR

SEQ ID NO: 494 - protein, 15 aa, Cricetulus griseus
DVMICPDTSLEDAKK

SEQ ID NO: 495 - protein, 189 aa, Mesocricetus auratus
MASKRALVILAKGAEEMETVIPVDIMRRAGIKVTVAGLAGKDPVQCSRDVMICPDTSLEDAKKQGPYDVVVLPGGNLGAQNLSESPVVKEILKEQESRKGLIAAICAGPTALLAHEIGFGSKVTTHPGAKDKMMNGSHYSYSESRVEKDGLILTSRGPGTSFEFALAIVEALSGKEAADQVKAPLVLKD

SEQ ID NO: 496 - protein, 7 aa, Cricetulus griseus
HVEEVRK

SEQ ID NO: 497 - protein, 8 aa, Cricetulus griseus
SHEAEVLK

SEQ ID NO: 498 - protein, 8 aa, Cricetulus griseus
KLEAAEER

SEQ ID NO: 499 - protein, 8 aa, Cricetulus griseus
DKHVEEVR

SEQ ID NO: 500 - protein, 9 aa, Cricetulus griseus
DLSLEEIQK

SEQ ID NO: 501 - protein, 9 aa, Cricetulus griseus
EHEKEVLQK

SEQ ID NO: 502 - protein, 10 aa, Cricetulus griseus
AIEENNNFSK

SEQ ID NO: 503 - protein, 12 aa, Cricetulus griseus
ESVPDFPLSPPK

SEQ ID NO: 504 - protein, 13 aa, Cricetulus griseus
ASGQAFELILSPR

SEQ ID NO: 505 - protein, 14 aa, Cricetulus griseus
SKESVPDFPLSPPK

SEQ ID NO: 506 - protein, 149 aa, Mus musculus
MASSGIQVKELEKRASGQAFELILSPRSKESVPDFPLSPPKKKDLSLEEIQKKLEAAEERRKSHEAEVLKQLAEKREHEKEVLQKAIEENNNFSKMAEEKLTHKMEANKENREAQMAAKLERLREKDKHVEEVRKNKESKDPADETEAD

SEQ ID NO: 507 - protein, 7 aa, Cricetulus griseus
DPGVLDR

SEQ ID NO: 508 - protein, 9 aa, Cricetulus griseus
ISSPTETVR

SEQ ID NO: 509 - protein, 10 aa, Cricetulus griseus
NQKDPGVLDR

SEQ ID NO: 510 - protein, 98 aa, Rattus norvegicus
MPTETERCIESLIAVFQKYSGKDGNSCHLSKTEFLSFMNTELAAFTKNQKDPGVLDRMMKKLDLNSDGQLDFQEFLNLIGGLAIACHESFLQTSQKRI

SEQ ID NO: 511 - protein, 7 aa, Cricetulus griseus
YNIWLGK

SEQ ID NO: 512 - protein, 8 aa, Cricetulus griseus
KYNIWLGK

SEQ ID NO: 513 - protein, 9 aa, Cricetulus griseus
YNIWLGKNK

SEQ ID NO: 514 - protein, 51 aa, Mus musculus
KYNIWLGKNKLFQDEPSAQHRLVSKSFPHPDFNMSLLQSVPTGADLSNDLM

SEQ ID NO: 515 - protein, 8 aa, Cricetulus griseus
LTPEEIER

SEQ ID NO: 516 - protein, 9 aa, Cricetulus griseus
ITITNDQNR

SEQ ID NO: 517 - protein, 10 aa, Cricetulus griseus
VYEGERPLTK

SEQ ID NO: 518 - protein, 11 aa, Cricetulus griseus
VEIIANDQGNR

SEQ ID NO: 519 - protein, 12 aa, Cricetulus griseus
DAGTIAGLNVMR

SEQ ID NO: 520 - protein, 11 aa, Cricetulus griseus
FEELNMDLRFR

SEQ ID NO: 521 - protein, 13 aa, Cricetulus griseus
SDIDEIVLGGSTR

SEQ ID NO: 522 - protein, 12 aa, Cricetulus griseus
AKFEELNMDLFR

SEQ ID NO: 523 - protein, 14 aa, Cricetulus griseus
TFAPEEISAMVLTK

SEQ ID NO: 524 - protein, 16 aa, Cricetulus griseus
IINEPTAAAIAYGLDK

SEQ ID NO: 525 - protein, 15 aa, Cricetulus griseus
NQLTSNPENTVFDAK

SEQ ID NO: 526 - protein, 17 aa, Cricetulus griseus
SQIFSTASDNQPTVTIK

SEQ ID NO: 527 - protein, 17 aa, Cricetulus griseus
VTHAVVTVPAYFNDAQR

SEQ ID NO: 528 - protein, 17 aa, Cricetulus griseus
MKFPMVAAALLLLCAVR

SEQ ID NO: 529 - protein, 18 aa, Cricetulus griseus
DNHLLGTFDLTGIPPAPR

SEQ ID NO: 530 - protein, 21 aa, Cricetulus griseus
LYGSAGPPPTGEEDTSEKDEL

SEQ ID NO: 531 - protein, 654 aa, Cricetulus griseus
MKFPMVAAALLLLCAVRAEEEDKKEDVGTVVGIDLGTTYSCVGVFKNGRVEIIANDQGNRITPSYVAFTPEGERLIGDAAKNQLTSNPENTVFDAKRLIGRTWNDPSVQQDIKFLPFKVVEKKTKPYIQVDIGGGQTKTFAPEEISAMVLTKMKETAEAYLGKKVTHAVVTVPAYFNDAQRQATKDAGTIAGLNVMRIINEPTAAAIAYGLDKREGEKNILVFDLGGGTFDVSLLTIDNGVFEVVATNGDTHLGGEDFDQRVMEHFIKLYKKKTGKDVRKDNRAVQKLRREVEKAKRALSSQHQARIEIESFFEGEDFSETLTRAKFEELNMDLFRSTMKPVQKVLEDSDLKKSDIDEIVLVGGSTRIPKIQQLVKEFFNGKEPSRGINPDEAVAYGAAVQAGVLSGDQDTGDLVLLDVCPLTLGIETVGGVMTKLIPRNTVVPTKKSQIFSTASDNQPTVTIKVYEGERPLTKDNHLLGTFDLTGIPPAPRGVPQIEVTFEIDVNGILRVTAEDKGTGNKNKITITNDQNRLTPEEIERMVNDAEKFAEEDKKLKERIDTRNELESYAYSLKNQIGDKEKLGGKLSSEDKETMEKAVEEKIEWLESHQDADIEDFKAKKKELEEIVQPIISKLYGSAGPPPTGEEDTSEKDEL

SEQ ID NO: 532 - protein, 8 aa, Cricetulus griseus
LTPEEIER

SEQ ID NO: 533 - protein, 9 aa, Cricetulus griseus
ITITNDQNR

SEQ ID NO: 534 - protein, 10 aa, Cricetulus griseus
VYEGERPLTK

SEQ ID NO: 535 - protein, 11 aa, Cricetulus griseus
VEIIANDQGNR

SEQ ID NO: 536 - protein, 12 aa, Cricetulus griseus
DAGTIAGLNVMR

SEQ ID NO: 537 - protein, 11 aa, Cricetulus griseus
FEELNMDLRFR

SEQ ID NO: 538 - protein, 13 aa, Cricetulus griseus
SDIDEIVLGGSTR

SEQ ID NO: 539 - protein, 12 aa, Cricetulus griseus
AKFEELNMDLFR

SEQ ID NO: 540 - protein, 14 aa, Cricetulus griseus
TFAPEEISAMVLTK

SEQ ID NO: 541 - protein, 16 aa, Cricetulus griseus
IINEPTAAAIAYGLDK

SEQ ID NO: 542 - protein, 15 aa, Cricetulus griseus
NQLTSNPENTVFDAK

SEQ ID NO: 543 - protein, 17 aa, Cricetulus griseus
SQIFSTASDNQPTVTIK

SEQ ID NO: 544 - protein, 17 aa, Cricetulus griseus
VTHAVVTVPAYFNDAQR

SEQ ID NO: 545 - protein, 17 aa, Cricetulus griseus
MKFPMVAAALLLLCAVR

SEQ ID NO: 546 - protein, 18 aa, Cricetulus griseus
DNHLLGTFDLTGIPPAPR

SEQ ID NO: 547 - protein, 655 aa, Mus musculus
MMKFTVVAAALLLLGAVRAEEEDKKEDVGTVVGIDLGTTYSCVGVFKNGRVEIIANDQGNRITPSYVAFTPEGERLIGDAAKNQLTSNPENTVFDAKRLIGRTWNDPSVQQDIKFLPFKVVEKKTKPYIQVDIGGGQTKTFAPEEISAMVLTKMKETAEAYLGKKVTHAVVTVPAYFNDAQRQATKDAGTIAGLNVMRIINEPTAAAIAYGLDKREGEKNILVFDLGGGTFDVSLLTIDNGVFEVVATNGDTHLGGEDFDQRVMEHFIKLYKKKTGKDVRKDNRAVQKLRREVEKAKRALSSQHQARIEIESFFEGEDFSETLTRAKFEELNMDLFRSTMKPVQEVLEDSDLKKSDIDEIVLVGGSTRIPKIQQLVKEFFNGKEPSRGINPDEAVAYGAAVQAGVLSGDQDTGDLVLLDVCPLTLGIETVGGVMTKLIPRNTVVPTKKSQIFSTASDNQPTVTIKVYEGERPLTKDNHLLGTFDLTGIPPAPRGVPQIEVTFEIDVNGIIRVTAEDKGTGNKNKITITNDQNRLTPEEIERMVNDAEKFAEEDKKLKERIDTRNELESYAYSLKNQIGDKEKLGGKLSSEDKETMEKAVEEKIEWLESHQDADIEDFKAKKKELEEIVQPIISKLYGSGGPPPTGEEDTSEKDEL

SEQ ID NO: 548 - protein, 7 aa, Cricetulus griseus
YAEEDRR

SEQ ID NO: 549 - protein, 12 aa, Cricetulus griseus
DAGQISGLNVLR

SEQ ID NO: 550 - protein, 11 aa, Cricetulus griseus
VQQTVQDLFGR

SEQ ID NO: 551 - protein, 14 aa, Cricetulus griseus
TTPSVVAFTADGER

SEQ ID NO: 552 - protein, 14 aa, Cricetulus griseus
SDIGEVILVGGMTR

SEQ ID NO: 553 - protein, 14 aa, Cricetulus griseus
MKETAENYLGHTAK

SEQ ID NO: 554 - protein, 15 aa, Cricetulus griseus
LLGQFTLIGIPPAPR

SEQ ID NO: 555 - protein, 15 aa, Cricetulus griseus
NAVITVPAYFNDSQR

SEQ ID NO: 556 - protein, 19 aa, Cricetulus griseus
STNGDTFLGGEDFDQALLR

SEQ ID NO: 557 - protein, 679 aa, Cricetulus griseus
MISATRAAAARLVGTAASRTPAAARHQDGWNGLSHEAFRFVSRRDYASETIKGAVVGIDLGTTNSCVAVMEGKQAKVLENAEGARTTPSVVAFTADGERLVGMPAKRQAVTNPNNTFYATKRLIGRRYDDPEVQKDTKNVPFKIVRASNGDAWVEAHGKLYSPSQIGAFVLMKMKETAENYLGHTAKNAVITVPAYFNDSQRQATKDAGQISGLNVLRVINEPTAAALAYGLDKSEDKIIAVYDLGGGTFDISILEIQKGVFEVKSTNGDTFLGGEDFDQALLRHIVKEFKRETGVDLTKDNMALQRVREAAEKAKCELSSSVQTDINLPYLTMDASGPKHLNMKLTRAQFEGIVTDLIKRTIAPCQKAMQDAEVSKSDIGEVILVGGMTRMPKVQQTVQDLFGRAPSKAVNPDEAVAIGAAIQGGVLAGDVTDVLLLDVTPLSLGIETLGGVFTKLINRNTTIPTKKSQVFSTAADGQTQVEIKVCQGEREMAGDNKLLGQFTLIGIPPAPRGVPQIEVTFDLDANGIVHVSAKDKGTGREQQIVIQSSGGLSKDDIENMVKNAEKYAEEDRRKKERVEAVNMAEGIIHDTETKMEEFKDQLPADECNKLKEEISKMRELLARKDSETGENIRQAASSLQQASLKLFEMAYKKMASEREGSGSSGTGEQKEDQKEEKQ

SEQ ID NO: 558 - protein, 9 aa, Cricetulus griseus
YTIGLGQAR

SEQ ID NO: 559 - protein, 9 aa, Cricetulus griseus
ASSELFNQK

SEQ ID NO: 560 - protein, 8 aa, Cricetulus griseus
LEDTYFDR

SEQ ID NO: 561 - protein, 10 aa, Cricetulus griseus
NSLSYDCIGR

SEQ ID NO: 562 - protein, 13 aa, Cricetulus griseus
TCVAPDVFAENMK

SEQ ID NO: 563 - protein, 12 aa, Cricetulus griseus
LEDTYFDRDVEK

SEQ ID NO: 564 - protein, 12 aa, Cricetulus griseus
MFLNDFLNDQNR

SEQ ID NO: 565 - protein, 18 aa, Cricetulus griseus
LPATAAESESAVISNGEH

SEQ ID NO: 566 - protein, 520 aa, Cricetulus griseus
MPGSLPLNAEACWPKDVGIVALEIYFPSQYVDQAELEKYDGVDAGKYTIGLGQARMGFCTDREDINSLCLTVVQNLMERNSLSYDCIGRLEVGTETIIDKSKSVKSNLMQLFEESGNTDIEGIDTTNACYGGTAAVFNAVNWIESSSWDGRYALVVAGDIAIYATGNARPTGGVGAVALLIGPNAPLIFDRGLRGTHMQHAYDFYKPDMLSEYPIVDGKLSIQCYLSALDRCYSVYRKKIRAQWQKEGNDNDFTLNDFGFMISHSPYCKLVQKSLARMFLNDFLNDQNRDKNSIYSGLEAFGDVKLEDTYFDRDVEKAFMKASSELFNQKTKASLLVSNQNGNMYTSSVYGSLASVLAQYSPQQLAGKRIGVFSYGSGLAATLYSLKVTQDATPGSALDKVTASLCDLKSRLDSRTCVAPDVFAENMKLREDTHHLANYIPQCSIDSLFEGTWYLVRVDEKHRRTYARRPSTNDHNLGDGVGLVHSNTATEHIPSPAKKVPRLPATAAESESAVISNGEH

SEQ ID NO: 567 - protein, 6 aa, Cricetulus griseus
NNDALR

SEQ ID NO: 568 - protein, 7 aa, Cricetulus griseus
FANYIDK

SEQ ID NO: 569 - protein, 8 aa, Cricetulus griseus
GTNESLER

SEQ ID NO: 570 - protein, 7 aa, Cricetulus griseus
FLEQQNK

SEQ ID NO: 571 - protein, 7 aa, Cricetulus griseus
QESNEYR

SEQ ID NO: 572 - protein, 8 aa, Cricetulus griseus
LLEGEEST

SEQ ID NO: 573 - protein, 9 aa, Cricetulus griseus
QVDQLTNDK

SEQ ID NO: 574 - protein, 9 aa, Cricetulus griseus
KLLEGEESR

SEQ ID NO: 575 - protein, 8 aa, Cricetulus griseus
LQEEMLQR

SEQ ID NO: 576 - protein, 8 aa, Cricetulus griseus
QESNEYRR

SEQ ID NO: 577 - protein, 9 aa, Cricetulus griseus
EYQDLLNVK

SEQ ID NO: 578 - protein, 10 aa, Cricetulus griseus
ILLAELEQLK

SEQ ID NO: 579 - protein, 10 aa, Cricetulus griseus
LGDLYEEEMR

SEQ ID NO: 580 - protein, 11 aa, Cricetulus griseus
EEAESTLQSFR

SEQ ID NO: 581 - protein, 11 aa, Cricetulus griseus
MALDIEIATYR

SEQ ID NO: 582 - protein, 10 aa, Cricetulus griseus
EKLQEEMLQR

SEQ ID NO: 583 - protein, 14 aa, Cricetulus griseus
ISLPLPNFSSLNLR

SEQ ID NO: 584 - protein, 13 aa, Cricetulus griseus
TNEKVELQELNDR

SEQ ID NO: 585 - protein, 13 aa, Cricetulus griseus
LGDLYEEEMRELR

SEQ ID NO: 586 - protein, 15 aa, Cricetulus griseus
ETNLESLPLVDTHSK

SEQ ID NO: 587 - protein, 14 aa, Cricetulus griseus
LQDEIQNMKEEMAR

SEQ ID NO: 588 - protein, 16 aa, Cricetulus griseus
DGQVINETSQHHDDLE

SEQ ID NO: 589 - protein, 19 aa, Cricetulus griseus
EMEENFALEAANYQDTIGR

SEQ ID NO: 590 - protein, 19 aa, Cricetulus griseus
LQEEMLQREEAESTLQSFR

SEQ ID NO: 591 - protein, 21 aa, Cricetulus griseus
QVQSLTCEVDALKGTNESLER

SEQ ID NO: 592 - protein, 380 aa, Cricetulus griseus
SLADACNTEFKNTRTNEKVELQELNDRFANYIDKVRFLEQQNKILLAELEQLKGQGKSRLGDLYEEEMRELRRQVDQLTNDKARVEVERDNLAEDIMRLREKLQEEMLQREEAESTLQSFRQDVDNASLARLDLERKVESLQEEIAFLKKLHDEEIQELQAQIQEQHVQIDVDVSKPDLTAALRDVRQQYESVAAKNLQEAEEWYKSKFADLSEAANRNNDALRQAKQESNEYRRQVQSLTCEVDALKGTNESLERQMREMEENFALEAANYQDTIGRLQDEIQNMKEEMARHLREYQDLLNVKMALDIEIATYRKLLEGEESRISLPLPNFSSLNLRETNLESLPLVDTHSKRTLLIKTVETRDGQVINETSQHHDDLE

SEQ ID NO: 593 - protein, 5 aa, Cricetulus griseus
FHIQR

SEQ ID NO: 594 - protein, 7 aa, Cricetulus griseus
NVVVIPK

SEQ ID NO: 595 - protein, 8 aa, Cricetulus griseus
VAIDAGYR

SEQ ID NO: 596 - protein, 8 aa, Cricetulus griseus
ILNKPGYR

SEQ ID NO: 597 - protein, 8 aa, Cricetulus griseus
TSAQVLIR

SEQ ID NO: 598 - protein, 9 aa, Cricetulus griseus
KTSAQVLIR

SEQ ID NO: 599 - protein, 8 aa, Cricetulus griseus
LIEYCHSK

SEQ ID NO: 600 - protein, 9 aa, Cricetulus griseus
REDLFIVSK

SEQ ID NO: 601 - protein, 14 aa, Cricetulus griseus
ALGVSNFNHFQIER

SEQ ID NO: 602 - protein, 18 aa, Cricetulus griseus
HKPVTNQVECHPYLTQEK

SEQ ID NO: 603 - protein, 316 aa, Cricetulus griseus
MSTFVELSTKAKMPIVGLGTWQSPPGQVKEAVKVAIDAGYRHIDCAYAYYNEHEVGEAIQEKIKEKAVRREDLFIVSKLWPTCFERKLLKEAFQKTLTDLKLDYLDLYLIHWPQGLQPGKELFPKDDQGNVLTSKITFLDAWEVMEELVDEGLVKALGVSNFNHFQIERILNKPGLKHKPVTNQVECHPYLTQEKLIEYCHSKGITVTAYSPLGSPNRPWAKPEDPSLLEDPKIKEIAAKHKKTSAQVLIRFHIQRNVVVIPKSVTPARIHENFQVFDFQLSDQEMATILGFNRNWRACLLPETVNMEEYPYDAEY

SEQ ID NO: 604 - protein, 5 aa, Cricetulus griseus
NRPNR

SEQ ID NO: 605 - protein, 6 aa, Cricetulus griseus
GFGSFR

SEQ ID NO: 606 - protein, 6 aa, Cricetulus griseus
HPALFK

SEQ ID NO: 607 - protein, 6 aa, Cricetulus griseus
FGRFDR

SEQ ID NO: 608 - protein, 8 aa, Cricetulus griseus
AIGVKPPR

SEQ ID NO: 609 - protein, 7 aa, Cricetulus griseus
VVRNNLR

SEQ ID NO: 610 - protein, 8 aa, Cricetulus griseus
KGDIFLVR

SEQ ID NO: 611 - protein, 8 aa, Cricetulus griseus
EMVELPLR

SEQ ID NO: 612 - protein, 8 aa, Cricetulus griseus
DHFEEAMR

SEQ ID NO: 613 - protein, 8 aa, Cricetulus griseus
DMELQLFR

SEQ ID NO: 614 - protein, 10 aa, Cricetulus griseus
LADESESNLR

SEQ ID NO: 615 - protein, 9 aa, Cricetulus griseus
LEILQIHTK

SEQ ID NO: 616 - protein, 9 aa, Cricetulus griseus
ESIESEIRR

SEQ ID NO: 617 - protein, 12 aa, Cricetulus griseus
GILLYGPPGTGK

SEQ ID NO: 618 - protein, 9 aa, Cricetulus griseus
RDHFEEAMR

SEQ ID NO: 619 - protein, 11 aa, Cricetulus griseus
LAGESESNLRK

SEQ ID NO: 620 - protein, 13 aa, Cricetulus griseus
EVIDIGIPDATGR

SEQ ID NO: 621 - protein, 12 aa, Cricetulus griseus
GVLFYGPPGCGK

SEQ ID NO: 622 - protein, 12 aa, Cricetulus griseus
WALSQSNPSALR

SEQ ID NO: 623 - protein, 14 aa, Cricetulus griseus
LGDVISIQPCPDVK

SEQ ID NO: 624 - protein, 13 aa, Cricetulus griseus
KYEMFAQTLQQSR

SEQ ID NO: 625 - protein, 13 aa, Cricetulus griseus
KYEMFAQTLQQSR

SEQ ID NO: 626 - protein, 15 aa, Cricetulus griseus
FDREVDIGIPDATGR

SEQ ID NO: 627 - protein, 16 aa, Cricetulus griseus
MTNGFSGADLTEICQR

SEQ ID NO: 628 - protein, 16 aa, Cricetulus griseus
MTNGFSGADLTEICQR

SEQ ID NO: 629 - protein, 15 aa, Cricetulus griseus
ELQELVQYPVEHPDK

SEQ ID NO: 630 - protein, 16 aa, Cricetulus griseus
VINQILTEMDGMSTKK

SEQ ID NO: 631 - protein, 18 aa, Cricetulus griseus
QTNSAMEVEEDDPVPEIR

SEQ ID NO: 632 - protein, 19 aa, Cricetulus griseus
QTNPSAMEVEEDDPVPEIR

SEQ ID NO: 633 - protein, 19 aa, Cricetulus griseus
EDEEESLNEVGYDDIDDCR

SEQ ID NO: 634 - protein, 806 aa, Rattus norvegicus
MASGADSKGDDLSTAILKQKNRPNRLIVDEAINEDNSVVSLSQPKMDELQLFRGDTVLLKGKKRREAVCIVLSDDTCSDEKIRMNRVVRNNLRVRLGDVISIQPCPDVKYGKRIHVLPIDDTVEGITGNLFEVYLKPYFLEAYRPIRKGDIFLVRGGMRAVEFKVVETDPSPYCIVAPDTVIHCEGEPIKREDEEESLNEVGYDDIGGCRKQLAQIKEMVELPLRHPALFKAIGVKPPRGILLYGPPGTGKTLIARAVANETGAFFFLINGPEIMSKLAGESESNLRKAFEEAEKNAPAIIFIDELDAIAPKREKTHGEVERRIVSQLLTLMDGLKQRAHVIVMAATNRPNSIDPALRRFGRFDREVDIGIPDATGRLEILQIHTKNMKLADDVDLEQVANETHGHVGADLAALCSEAALQAIRKKMDLIDLEDETIDAEVMNSLAVTMDDFRWALSQSNPSALRETVVEVPQVTWEDIGGLEDVKRELQELVQYPVEHPDKFLKFGMTPSKGVLFYGPPGCGKTLLAKAIANECQANFISIKGPELLTMWFGESEANVREIFDKARQAAPCVLFFDELDSIAKARGGNIGDGGGAADRVINQILTEMDGMSTKKNVFIIGATNRPDIIDPAILRPGRLDQLIYIPLPDEKSRVAILKANLRKSPVAKDVDLEFLAKMTNGFSGADLTEICQRACKLAIRESIESEIRRERERQTNPSAMEVEEDDPVPEIRRDHFEEAMRFARRSVSDNDIRKYEMFAQTLQQSRGFGSFRFPSGNQGGAGPSQGSGGGTGGNVYTEDNDDDLYG

SEQ ID NO: 635 - protein, 6 aa, Cricetulus griseus
QAIAER

SEQ ID NO: 636 - protein, 6 aa, Cricetulus griseus
FYAFGR

SEQ ID NO: 637 - protein, 6 aa, Cricetulus griseus
KLWGDR

SEQ ID NO: 638 - protein, 7 aa, Cricetulus griseus
TILMMGR

SEQ ID NO: 639 - protein, 8 aa, Cricetulus griseus
FSVSPVVR

SEQ ID NO: 640 - protein, 8 aa, Cricetulus griseus
SDPVVSYR

SEQ ID NO: 641 - protein, 10 aa, Cricetulus griseus
GGGQIIPTAR

SEQ ID NO: 642 - protein, 10 aa, Cricetulus griseus
GEGQLGPAER

SEQ ID NO: 643 - protein, 9 aa, Cricetulus griseus
VFDAIMNFR

SEQ ID NO: 644 - protein, 9 aa, Cricetulus griseus
VFDAIMNFR

SEQ ID NO: 645 - protein, 9 aa, Cricetulus griseus
YEWDVAEAR

SEQ ID NO: 646 - protein, 10 aa, Cricetulus griseus
EGALCEENMR

SEQ ID NO: 647 - protein, 10 aa, Cricetulus griseus
EDLYLKPIQR

SEQ ID NO: 648 - protein, 12 aa, Cricetulus griseus
DSVVAGFQWATK

SEQ ID NO: 649 - protein, 12 aa, Cricetulus griseus
CLYASVLTAQPR

SEQ ID NO: 650 - protein, 11 aa, Cricetulus griseus
KEDLYLKPIQR

SEQ ID NO: 651 - protein, 13 aa, Cricetulus griseus
RCLYASVLTAQPR

SEQ ID NO: 652 - protein, 14 aa, Cricetulus griseus
TGTITTFEHAHNMR

SEQ ID NO: 653 - protein, 14 aa, Cricetulus griseus
TGTITTFEHAHNMR

SEQ ID NO: 654 - protein, 14 aa, Cricetulus griseus
YLAEKYEWDVAEAR

SEQ ID NO: 655 - protein, 16 aa, Cricetulus griseus
GPLMMYISKMVPTSDK

SEQ ID NO: 656 - protein, 18 aa, Cricetulus griseus
CELLYEGPPDDEAAMGIK

SEQ ID NO: 657 - protein, 20 aa, Cricetulus griseus
ARPFPDGLAEDIDKGEVSAR

SEQ ID NO: 658 - protein, 858 aa, Cricetulus griseus
MVNFTVDQIRAIMDKKANIRNMSVIAHVDHGKSTLTDSLVCKAGIIASARAGETRFTDTRKDEQERCITIKSTAISLFYELSENDLNFIKQSKDGSGFLINLIDSPGHVDFSSEVTAALRVTDGALVVVDCVSGVCVQTETVLRQAIAERIKPVLMMNKMDRALLELQLEPEELYQTFQRIVENVNVIISTYGEGESGPMGNIMIDPVLGTVGFGSGLHGWAFTLKQFAEMYVAKFAAKGEGQLGPAERAKKVEDMMKKLWGDRYFDPANGKFSKSANSPDGKKLPRTFCQLILDPIFKVFDAIMNFRKEETAKLIEKLDIKLDSEDKDKEGKPLLKAVMRRWLPAGDALLQMITIHLPSPVTAQKYRCELLYEGPPDDEAAMGIKSCDPKGPLMMYISKMVPTSDKGRFYAFGRVFSGVVSTGLKVRIMGPNYTPGKKEDLYLKPIQRTILMMGRYVEPIEDVPCGNIVGLVGVDQFLVKTGTITTFEHAHNMRVMKFSVSPVVRVAVEAKNPADLPKLVEGLKRLAKSDPMVQCIIEESGEHIIAGAGELHLEICLKDLEEDHACIPIKKSDPVVSYRETVSEESNVLCLSKSPNKHNRLYMKARPFPDGLAEDIDKGEVSARQELKARARYLAEKYEWDVAEARKIWCFGPDGTGPNILTDITKGVQYLNEIKDSVVAGFQWATKEGALCEENMRGVRFDVHDVTLHADAIHRGGGQIIPTARRCLYASVLTAQPRLMEPIYLVEIQCPEQVVGGIYGVLNRKRGHVFEESQVAGTPMFVVKAYLPVNESFGFTADLRSNTGGQAFPQCVFDHWQILPGDPFDNSSRPSQVVAETRKRKGLKEGIPALDNFLDKL

SEQ ID NO: 659 - protein, 5 aa, Cricetulus griseus
FPQPR

SEQ ID NO: 660 - protein, 7 aa, Cricetulus griseus
NLGLYVK

SEQ ID NO: 661 - protein, 8 aa, Cricetulus griseus
AFFAGSQR

SEQ ID NO: 662 - protein, 9 aa, Cricetulus griseus
AHAHLDTGR

SEQ ID NO: 663 - protein, 9 aa, Cricetulus griseus
VTEGGEPYR

SEQ ID NO: 664 - protein, 8 aa, Cricetulus griseus
YFTWDPSR

SEQ ID NO: 665 - protein, 10 aa, Cricetulus griseus
LVAIVDPHIK

SEQ ID NO: 666 - protein, 10 aa, Cricetulus griseus
AHAHLDTGRR

SEQ ID NO: 667 - protein, 11 aa, Cricetulus griseus
LKVTEGGEPYR

SEQ ID NO: 668 - protein, 10 aa, Cricetulus griseus
TCEESSFCKR

SEQ ID NO: 669 - protein, 12 aa, Cricetulus griseus
VLLVLELQGLQK

SEQ ID NO: 670 - protein, 12 aa, Cricetulus griseus
WYQMGAYQPFFR

SEQ ID NO: 671 - protein, 13 aa, Cricetulus griseus
YFTWDPSRFPQPR

SEQ ID NO: 672 - protein, 755 aa, Homo sapiens
MAAVAAVAARRRRSWASLVLAFLGVCLGITLAVDRSNFKTCEESSFCKRQRSIRPGLSPYRALLDSLQLGPDSLTVHLIHEVTKVLLVLELQGLQKNMTRFRIDELEPRRPRYRVPDVLVADPPIARLSVSGRDENSVELTMAEGPYKIILTARPFRLDLLEDRSLLLSVNARGLLEFEHQRAPRVSFSDKVNLTLGSIWDKIKNLFSRQGSKDPAEGDGAQPEETPRDGDKPEETQGKAEKDEPGAWEETFKTHSDSKPYGPMSVGLDFSLPGMEHVYGIPEHADNLRLKVTEGGEPYRLYNLDVFQYELYNPMALYGSVPVLLAHNPHRDLGIFWLNAAETWVDISSNTAGKTLFGKMMDYLQGSGETPQTDVRWMSETGIIDVFLLLGPSISDVFRQYASLTGTQALPPLFSLGYHQSRWNYRDEADVLEVDQGFDDHNLPCDVIWLDIEHADGKRYFTWDPSRFPQPRTMLERLASKRRKLVAIVDPHIKVDSGYRVHEELRNLGLYVKTRDGSDYEGWCWPGSAGYPDFTNPTMRAWWANMFSYDNYEGSAPNLFVWNDMNEPSVFNGPEVTMLKDAQHYGGWEHRDVHNIYGLYVHMATADGLRQRSGGMERPFVLARAFFAGSQRFGAVWTGDNTAEWDHLKISIPMCLSLGLVGLSFCGADVGGFFKNPEPELLVRWYQMGAYQPFFRAHAHLDTGRREPWLLPSQHNDIIRDALGQRYSLLPFWYTLLYQAHREGIPVMRCSTLRM

SEQ ID NO: 673 - protein, 7 aa, Cricetulus griseus
NIGPLVK

SEQ ID NO: 674 - protein, 6 aa, Cricetulus griseus
FLEGKR

SEQ ID NO: 675 - protein, 7 aa, Cricetulus griseus
VMNILHR

SEQ ID NO: 676 - protein, 7 aa, Cricetulus griseus
VMNILHR

SEQ ID NO: 677 - protein, 6 aa, Cricetulus griseus
FCYHER

SEQ ID NO: 678 - protein, 8 aa, Cricetulus griseus
FAYDGLKR

SEQ ID NO: 679 - protein, 10 aa, Cricetulus griseus
VAVTPPGLAR

SEQ ID NO: 680 - protein, 8 aa, Cricetulus griseus
SWLHNDLK

SEQ ID NO: 681 - protein, 9 aa, Cricetulus griseus
FEAPLFNAR

SEQ ID NO: 682 - protein, 10 aa, Cricetulus griseus
MTSGVTGDWK

SEQ ID NO: 683 - protein, 10 aa, Cricetulus griseus
SATYVNTEGR

SEQ ID NO: 684 - protein, 10 aa, Cricetulus griseus
ASQTMAKCVK

SEQ ID NO: 685 - protein, 9 aa, Cricetulus griseus
QRLTEPMVR

SEQ ID NO: 686 - protein, 10 aa, Cricetulus griseus
LEEVSPNLVR

SEQ ID NO: 687 - protein, 11 aa, Cricetulus griseus
VAGMLQSFQGK

SEQ ID NO: 688 - protein, 10 aa, Cricetulus griseus
DFYMTDSISR

SEQ ID NO: 689 - protein, 10 aa, Cricetulus griseus
DFYMTDSISR

SEQ ID NO: 690 - protein, 12 aa, Cricetulus griseus
AVEDKNIGPLVK

SEQ ID NO: 691 - protein, 12 aa, Cricetulus griseus
GNDMQVGTYIEK

SEQ ID NO: 692 - protein, 12 aa, Cricetulus griseus
GNDMQVGTYIEK

SEQ ID NO: 693 - protein, 13 aa, Cricetulus griseus
KPMVVLGSSALQR

SEQ ID NO: 694 - protein, 13 aa, Cricetulus griseus
KPMVVLGSSALQR

SEQ ID NO: 695 - protein, 12 aa, Cricetulus griseus
NRLEEVSPNLVR

SEQ ID NO: 696 - protein, 16 aa, Cricetulus griseus
FASEIAGVDDLGTTGR

SEQ ID NO: 697 - protein, 727 aa, Homo sapiens [sequence omitted]

SEQ ID NO: 698 - protein, 6 aa, Cricetulus griseus
IQQLVK

SEQ ID NO: 699 - protein, 6 aa, Cricetulus griseus
EFFNGK

SEQ ID NO: 700 - protein, 7 aa, Cricetulus griseus
VMEHFIK

SEQ ID NO: 701 - protein, 7 aa, Cricetulus griseus
VMEHFIK

SEQ ID NO: 702 - protein, 8 aa, Cricetulus griseus
LTPEEIER

SEQ ID NO: 703 - protein, 9 aa, Cricetulus griseus
ALSSQHQAR

SEQ ID NO: 704 - protein, 9 aa, Cricetulus griseus
ITITNDQNR

SEQ ID NO: 705 - protein, 10 aa, Cricetulus griseus
RALSSQHQAR

SEQ ID NO: 706 - protein, 10 aa, Cricetulus griseus
EFFNGKEPSR

SEQ ID NO: 707 - protein, 11 aa, Cricetulus griseus
VEIIANDQGNR

SEQ ID NO: 708 - protein, 12 aa, Cricetulus griseus
DAGTIAGLNVMR

SEQ ID NO: 709 - protein, 11 aa, Cricetulus griseus
NKITITNDQNR

SEQ ID NO: 710 - protein, 12 aa, Cricetulus griseus
TWNDPSVQQDIK

SEQ ID NO: 711 - protein, 14 aa, Cricetulus griseus
SDIDEIVLVGGSTR

SEQ ID NO: 712 - protein, 12 aa, Cricetulus griseus
AKFEELNMDLFR

SEQ ID NO: 713 - protein, 14 aa, Cricetulus griseus
NQLTSNPENTVDAK

SEQ ID NO: 714 - protein, 17 aa, Cricetulus griseus
IINEPTAAAIAYGLDKR

SEQ ID NO: 715 - protein, 17 aa, Cricetulus griseus
SQIFSTASDNQPTVTIK

SEQ ID NO: 716 - protein, 17 aa, Cricetulus griseus
VTHAVVTVPAYFNDAQR

SEQ ID NO: 717 - protein, 18 aa, Cricetulus griseus
KVTHAVVTVPAYFNDAQR

SEQ ID NO: 718 - protein, 594 aa, Canis familiaris
MKLSLVAAVLLLLSAARAEEEDKKEDVGTVVGIDLGTTYSCVGVFKNGRVEIIANDQGNRITPSYVAFTPEGERLIGDAAKNQLTSNPENTVFDAKRLIGRTWNDPSVQQDIKFLPFKVVEKKTKPYIQVDIGGGQTKTFAPEEISAMVLTKMKETAEAYLGKKVTHAVVTVPAYFNDAQRQATKDAGTIAGLNVMRIINEPTAAAIAYGLDKREGEKNILVFDLGGGTFDVSLLTIDNGVFEVVATNGDTHLGGEDFDQRVMEHFIKLYKKKTGKDVRKDNRAVQKLRREVEKAKRALSSQHQARIEIESFYEGEDFSETLTRAKFEELNMDLFRSTMKPVQKVLEDSDLKKSDIDEIVLVGGSTRIPKIQQLVKEFFNGKEPSRGINPDEAVAYGAAVQAGVLSGDQDTGDLVLLDVCPLTLGIETVGGVMTKLIPRNTVVPTKKSQIFSTASDNQPTVTIKVYEGERPLTKDNHLLGTFDLTGIPPAPRGVPQIEVTFEIDVNGILRVTAEDKGTGNKNKITITNDQNRLTPEEIERMIEWLESHQDADIEDFKAKKKELEEIVQPIISKLYGSAGPPPTGDEEPADKDEL

SEQ ID NO: 719 - protein, 8 aa, Cricetulus griseus
VCNPIITK

SEQ ID NO: 720 - protein, 8 aa, Cricetulus griseus
INDEDKQK

SEQ ID NO: 721 - protein, 8 aa, Cricetulus griseus
LSKEDIER

SEQ ID NO: 722 - protein, 9 aa, Cricetulus griseus
ITITNDKGR

SEQ ID NO: 723 - protein, 9 aa, Cricetulus griseus
LLQDFFNGK

SEQ ID NO: 724 - protein, 12 aa, Cricetulus griseus
DAGTIAGLNVLR

SEQ ID NO: 725 - protein, 11 aa, Cricetulus griseus
VEIIANDQGNR

SEQ ID NO: 726 - protein, 10 aa, Cricetulus griseus
MVNHFIAEFK

SEQ ID NO: 727 - protein, 10 aa, Cricetulus griseus
MVNHFIAEFK

SEQ ID NO: 728 - protein, 11 aa, Cricetulus griseus
MKEIAEAYLGK

SEQ ID NO: 729 - protein, 11 aa, Cricetulus griseus
MKEIAEAYLGK

SEQ ID NO: 730 - protein, 11 aa, Cricetulus griseus
NSLESYAFNMK

SEQ ID NO: 731 - protein, 11 aa, Cricetulus griseus
NSLESYAFNMK

SEQ ID NO: 732 - protein, 11 aa, Cricetulus griseus
MVNHFIAEFKR

SEQ ID NO: 733 - protein, 11 aa, Cricetulus griseus
MVNHFIAEFKR

SEQ ID NO: 734 - protein, 12 aa, Cricetulus griseus
RFDDAVVQSDMK

SEQ ID NO: 735 - protein, 12 aa, Cricetulus griseus
ARFEELNADLFR

SEQ ID NO: 736 - protein, 14 aa, Cricetulus griseus
SQIHDIVLVGGSTR

SEQ ID NO: 737 - protein, 13 aa, Cricetulus griseus
TTPSYVAFTDTER

SEQ ID NO: 738 - protein, 14 aa, Cricetulus griseus
SFYPEEVSSMVLTK

SEQ ID NO: 739 - protein, 15 aa, Cricetulus griseus
NQVAMNPTNTVFDAK

SEQ ID NO: 740 - protein, 16 aa, Cricetulus griseus
STAGDTHLGGEDFDNR

SEQ ID NO: 741 - protein, 17 aa, Cricetulus griseus
IINEPTAAAIAYGLDKK

SEQ ID NO: 742 - protein, 16 aa, Cricetulus griseus
NQVAMNPTNTVFDAKR

SEQ ID NO: 743 - protein, 16 aa, Cricetulus griseus
NQVAMNPTNTVFDAKR

SEQ ID NO: 744 - protein, 17 aa, Cricetulus griseus
LDKSQIHDIVLVGGSTR

SEQ ID NO: 745 - protein, 18 aa, Cricetulus griseus
TVTNAVVTVPAYFNDSQR

SEQ ID NO: 746 - protein, 646 aa, Mus musculus; identical to SEQ ID NO: 411

SEQ ID NO: 747 - protein, 5 aa, Cricetulus griseus
RFHGR

SEQ ID NO: 748 - protein, 6 aa, Cricetulus griseus
VLTFYR

SEQ ID NO: 749 - protein, 8 aa, Cricetulus griseus
MDQPPQAK

SEQ ID NO: 750 - protein, 8 aa, Cricetulus griseus
NTVQGFKR

SEQ ID NO: 751 - protein, 8 aa, Cricetulus griseus
VTYMEEER

SEQ ID NO: 752 - protein, 11 aa, Cricetulus griseus
CTPACVSFGPK

SEQ ID NO: 753 - protein, 11 aa, Cricetulus griseus
AFSDPFVEAEK

SEQ ID NO: 754 - protein, 11 aa, Cricetulus griseus
QDLPALEEKPR

SEQ ID NO: 755 - protein, 14 aa, Cricetulus griseus
AGGIETIANEYSDR

SEQ ID NO: 756 - protein, 840 aa, Rattus norvegicus; identical to SEQ ID NO: 43

SEQ ID NO: 757 - protein, 6 aa, Cricetulus griseus
AIEVGR

SEQ ID NO: 758 - protein, 6 aa, Cricetulus griseus
SLAEHR

SEQ ID NO: 759 - protein, 6 aa, Cricetulus griseus
LENDPR

SEQ ID NO: 760 - protein, 6 aa, Cricetulus griseus
FEEAKR

SEQ ID NO: 761 - protein, 7 aa, Cricetulus griseus
IGNSYFK

SEQ ID NO: 762 - protein, 7 aa, Cricetulus griseus
DFDMALK

SEQ ID NO: 763 - protein, 7 aa, Cricetulus griseus
AMDVYQK

SEQ ID NO: 764 - protein, 7 aa, Cricetulus griseus
ELIEQLR

SEQ ID NO: 765 - protein, 8 aa, Cricetulus griseus
EAADGYQR

SEQ ID NO: 766 - protein, 8 aa, Cricetulus griseus
GDYPQAMK

SEQ ID NO: 767 - protein, 7 aa, Cricetulus griseus
ILKEQER

SEQ ID NO: 768 - protein, 7 aa, Cricetulus griseus
ENREDYR

SEQ ID NO: 769 - protein, 8 aa, Cricetulus griseus
HYTEAIKR

SEQ ID NO: 770 - protein, 9 aa, Cricetulus griseus
EGLQNMEAR

SEQ ID NO: 771 - protein, 8 aa, Cricetulus griseus
CMMAQYNR

SEQ ID NO: 772 - protein, 9 aa, Cricetulus griseus
NKGNECFQK

SEQ ID NO: 773 - protein, 10 aa, Cricetulus griseus
IGNSYFKEER

SEQ ID NO: 774 - protein, 10 aa, Cricetulus griseus
YKDAIHFYNK

SEQ ID NO: 775 - protein, 12 aa, Cricetulus griseus
LDPQNHVLYSNR

SEQ ID NO: 776 - protein, 17 aa, Cricetulus griseus
AMADPEVQQIMSDPAMR

SEQ ID NO: 777 - protein, 19 aa, Cricetulus griseus
RAMADEPEVQQIMSDPAMR

SEQ ID NO: 778 - protein, 543 aa, Cricetulus griseus
MEQVNELKEKGNKALSAGNIDDALQCYSEAIKLDPQNHVLYSNRSAAYAKKGDYQKAYEDGCKTVDLKPDWGKGYSRKAAALEFLNRFEEAKRTYEEGLKHEANNLQLKEGLQNMEARLAERKFMNPFNLPNLYQKLENDPRTRTLLSDPTYRELIEQLRNKPSDLGTKIQDPRIMTTLSVLLGVDLGSMDEEEEAATPPPPPPSKKEAKPEPMEEDLPENKKQALKEKEMGNEAYKKKDFDMALKHYDRAKELDPTNMTYITNQAAVHFEKGDYNKCRELCEKAIEVGRENREDYRQIAKAYARIGNSYFKEERYKDAIHFYNKSLAEHRTPDVLKKCQQAEKILKEQERLAYINPDLALEEKNKGNECFQKGDYPQAMKHYTEAIKRNPKDAKLYSNRAACYTKLLEFQLALKDCEECIQLEPTFIKGYTRKAAALEAMKDYTKAMDVYQKALELDSSCKEAADGYQRCMMAQYNRHDSPEDVKRRAMADPEVQQIMSDPAMRLILEQMQKDPQALSEHLKNPVIAQKIQKLMDVGLIAIR

SEQ ID NO: 779 - protein, 6 aa, Cricetulus griseus
KYEGGR

SEQ ID NO: 780 - protein, 6 aa, Cricetulus griseus
GSNYWR

SEQ ID NO: 781 - protein, 8 aa, Cricetulus griseus
LNFAVASR

SEQ ID NO: 782 - protein, 10 aa, Cricetulus griseus
YGVSGYPTLK

SEQ ID NO: 783 - protein, 9 aa, Cricetulus griseus
FVMQEEFSR

SEQ ID NO: 784 - protein, 9 aa, Cricetulus griseus
FVMQEEFSR

SEQ ID NO: 785 - protein, 11 aa, Cricetulus griseus
LAPEYEAAATR

SEQ ID NO: 786 - protein, 12 aa, Cricetulus griseus
DGEEAGAYDGPR

SEQ ID NO: 787 - protein, 11 aa, Cricetulus griseus
FAHTNVESLVK

SEQ ID NO: 788 - protein, 12 aa, Cricetulus griseus
RLAPEYEAAATR

SEQ ID NO: 789 - protein, 13 aa, Cricetulus griseus
SEPIPETNDGPVK

SEQ ID NO: 790 - protein, 12 aa, Cricetulus griseus
FLQDYFDGNLKR

SEQ ID NO: 791 - protein, 14 aa, Cricetulus griseus
EATTPPIIQEEKPK

SEQ ID NO: 792 - protein, 14 aa, Cricetulus griseus
FISDKDASVVGFFR

SEQ ID NO: 793 - protein, 15 aa, Cricetulus griseus
MDATANDVPSPYEVK

SEQ ID NO: 794 - protein, 15 aa, Cricetulus griseus
MDATANDVPSPYEVK

SEQ ID NO: 795 - protein, 15 aa, Cricetulus griseus
IFRDGEEAGAYDGPR

SEQ ID NO: 796 - protein, 505 aa, Cricetulus griseus
MRFSCLALLPGVALLLASARLAAASDVLELTDENFESRVSDTGSAGLMLVEFFAPWCGHCKRLAPEYEAAATRLKGIVPLTKVDCTANTNTCNKYGVSGYPTLKIFRDGEEAGAYDGPRTADGIVSHLKKQAGPASVLLRSEEEFKKFISDKDASVVGFFRDLFSDGHSEFLKAASNLRDNYRFAHTNVESLVKEYDDNGEGITLFRPSHLANKFEDKTVVYTEQKMTSGKIKRFIQESIFGICPHMTEDNKDLIQSKDLLTAYYDVDYEKNAKGSNYWRNRVMMVAKKFLDAGHKLNFAVASRKTFSHELSDFGLESTTGEVPVVAIRTAKGEKFVMQEEFSRDGKALERFLQDYFDGNLKRYLKSEPIPETNDGPVKVVVAENFDDIVNNEDKDVLIEFYAPWCGHCKNLEPKYKELGEKLSKDPNIVIAKMDATANDVPSPYEVKGFPTIYFSPANKKLNPKKYEGGRELNDFINYLQREATTPPIIQEEKPKKKKKAQEDL

SEQ ID NO: 797 - protein, 9 aa, Cricetulus griseus
FMGTELNGK

SEQ ID NO: 798 - protein, 10 aa, Cricetulus griseus
QADVNLVNAK

SEQ ID NO: 799 - protein, 11 aa, Cricetulus griseus
GGIVDEGALLR

SEQ ID NO: 800 - protein, 12 aa, Cricetulus griseus
ILQDGGLQVVEK

SEQ ID NO: 801 - protein, 13 aa, Cricetulus griseus
GTIQVVTQGTSLK

SEQ ID NO: 802 - protein, 12 aa, Cricetulus griseus
VLISDSLDPCCR

SEQ ID NO: 803 - protein, 15 aa, Cricetulus griseus
AGTGVDNVDLEAATR

SEQ ID NO: 804 - protein, 13 aa, Cricetulus griseus
VLISDSLDPCCRK

SEQ ID NO: 805 - protein, 13 aa, Cricetulus griseus
KVLISDSLDPCCR

SEQ ID NO: 806 - protein, 19 aa, Cricetulus griseus
ALVDHENVISCPHLGASTK

SEQ ID NO: 807 - protein, 533 aa, Mus musculus; identical to SEQ ID NO: 143

SEQ ID NO: 808 - protein, 6 aa, Cricetulus griseus
TVLKPR

SEQ ID NO: 809 - protein, 5 aa, Cricetulus griseus
YMMTR

SEQ ID NO: 810 - protein, 6 aa, Cricetulus griseus
IQSHSR

SEQ ID NO: 811 - protein, 5 aa, Cricetulus griseus
YMMTR

SEQ ID NO: 812 - protein, 7 aa, Cricetulus griseus
ASALCDR

SEQ ID NO: 813 - protein, 8 aa, Cricetulus griseus
DITLEASR

SEQ ID NO: 814 - protein, 9 aa, Cricetulus griseus
ILHTAWHPK

SEQ ID NO: 815 - protein, 10 aa, Cricetulus griseus
DKRPEGYNLK

SEQ ID NO: 816 - protein, 12 aa, Cricetulus griseus
NAAQFLLSTNDK

SEQ ID NO: 817 - protein, 11 aa, Cricetulus griseus
LFEEPEDPSNR

SEQ ID NO: 818 - protein, 11 aa, Cricetulus griseus
VVIFQQEQENK

SEQ ID NO: 819 - protein, 13 aa, Cricetulus griseus
HSKLEEPEDPSNR

SEQ ID NO: 820 - protein, 461 aa, Canis familiaris
MAGAGGGNDIQWCFSQVKGAVDDDVAEADIISTVEFNHSGELLATGDKGGRVVIFQQEQENKIQSHSRGEYNVYSTFQSHEPEFDYLKSLEIEEKINKIRWLPQKNAAQFLLSTNDKTIKLWKISERDKRPEGYNLKEEDGRGPTVPGADPGPNTDYATHFCPHGLNVPVFRPMDLMVEASPRRIFANAHTYHINSISINSDYETYLSADDLRINLWHLEITDRSFNIVDIKPANMEELTEVITAAEFHPNSCNTFVYSSSKGTIRLCDMRASALCDRHSKLFEEPEDPSNRSFFSEIISSISDVKFSHSGRYMMTRDYLSVKIWDLNMENRPVETYQVHEYLRSKLCSLYENDCIFDKFECCWNGSDSVVMTGSYNNFFRMFDRNTKRDITLEASRENNKPRTVLKPRKVCASGKRKKDEISVDSLDFNKKILHTAWHPKENIIAVATTNNLYIFQDKVN

SEQ ID NO: 821 - protein, 6 aa, Cricetulus griseus
CYSVYR

SEQ ID NO: 822 - protein, 7 aa, Cricetulus griseus
MGFCTDR

SEQ ID NO: 823 - protein, 9 aa, Cricetulus griseus
YTIGLGQAR

SEQ ID NO: 824 - protein, 9 aa, Cricetulus griseus
ASSELFNQK

SEQ ID NO: 825 - protein, 13 aa, Cricetulus griseus
VTQDATPGSALDK

SEQ ID NO: 826 - protein, 12 aa, Cricetulus griseus
LSIQCYLSALDR

SEQ ID NO: 827 - protein, 13 aa, Cricetulus griseus
TCVAPDVFAENMK

SEQ ID NO: 828 - protein, 13 aa, Cricetulus griseus
TCVAPDVFAENMK

SEQ ID NO: 829 - protein, 12 aa, Cricetulus griseus
LEDTYFDRDVEK

SEQ ID NO: 830 - protein, 11 aa, Cricetulus griseus
MFLNDFLNQNR

SEQ ID NO: 831 - protein, 16 aa, Cricetulus griseus
DKNSIYSGLEAFGDVK

SEQ ID NO: 832 - protein, 14 aa, Cricetulus griseus
MFLNDFLNDQNRDK

SEQ ID NO: 833 - protein, 520 aa, Mus musculus
MPGSLPLNAEACWPKDVGIVALEIYFPSQYVDQAELEKYDGVDAGKYTIGLGQARMGFCTDREDINSLCPTVVQKLMERHSLSYDCIGRLEVGTETIIDKSKSVKSNLMQLFEESGNTDIEGIDTTNACYGGTAAVFNAVNWVESSSWDGRYALVVAGDIAIYATGNARPTGGVGAVALLIGPNAPLIFDRGLRGTHMQHAYDFYKPDMLSEYPVVDGKLSIQCYLSALDRCYSVYRKKIRAQWQKEGKDKDFTLNDFGFMIFHSPYCKLVQKSLARMFLNDFLNDQNRDKNSIYSGLEAFGDVKLEDTYFDRDVEKAFMKASSELFNQKTKASLLVSNQNGNMYTSSVYGSLASVLAQYSPQQLAGKRVGVFSYGSGLAATLYSLKVTQDATPGSALDKITASLCDLKSRLDSRTCVAPDVFAENMKLREDTHHLANYIPQCSIDSLFEGTWYLVRVDEKHRRTYARRPFTNDHSLDEGMGLVHSNTATEHIPSPAKKVPRLPATSAESESAVISNGEH

SEQ ID NO: 834 - protein, 9 aa, Cricetulus griseus
TAVCDIPPR

SEQ ID NO: 835 - protein, 8 aa, Cricetulus griseus
IREEYPDR

SEQ ID NO: 836 - protein, 10 aa, Cricetulus griseus
FPGQLNADLR

SEQ ID NO: 837 - protein, 10 aa, Cricetulus griseus
LAVNMVPFPR

SEQ ID NO: 838 - protein, 444 aa, Mus musculus
MREIVHLQAGQCGNQIGAKFWEVISDEHGIDTTGTYHGDSDLQLERINVYYNEATGGKYVPRAVLVDLEPCTMDSVRSGPFGQIFRPDNFVFGQSGAGNNWAKGHYTEGAELVDSVLDVVRKEAESCDCLQGFQLTHSLGGGTGSGMGTLISKIREEYPDRIMNTFSVVPSPKVSDTVVEPYNATLSVHQLVENTDETYCIDDEALYDICFRTLKLTTPTYGDLNHLVSATMSGVTTCLRFPGQLNADLRKLAVNMVPFPRLHFFMPGFAPLTSRGSQQYRALTVPELTQQMFDAKNMMAACDPRHGRYLTVAAVFRGRMSMKEVDEQMLNVQNKNSSYFVEWIPNNVKTAVCDIPPRGLKMSTTFIGNSTAIQELFKRISEQFTAMFPRKTFLHWYTGEGMDEMEFTEAESNMNDLVSEYQQYQDATAEEEGEYEEEAEEEVA

SEQ ID NO: 839 - protein, 6 aa, Cricetulus griseus
IDIAGR

SEQ ID NO: 840 - protein, 6 aa, Cricetulus griseus
GLLSIR

SEQ ID NO: 841 - protein, 5 aa, Cricetulus griseus
LYLRK

SEQ ID NO: 842 - protein, 7 aa, Cricetulus griseus
ISAPQER

SEQ ID NO: 843 - protein, 10 aa, Cricetulus griseus
AGFAGDQIPK

SEQ ID NO: 844 - protein, 8 aa, Cricetulus griseus
YPMHGIVK

SEQ ID NO: 845 - protein, 8 aa, Cricetulus griseus
IWQYVYSK

SEQ ID NO: 846 - protein, 9 aa, Cricetulus griseus
YPMEHGIVK

SEQ ID NO: 847 - protein, 11 aa, Cricetulus griseus
YCFPNYVGRPK

SEQ ID NO: 848 - protein, 15 aa, Cricetulus griseus
VMAGALEGDIFIGPK

SEQ ID NO: 849 - protein, 15 aa, Cricetulus griseus
VMAGALEGDIFIGPK

SEQ ID NO: 850 - protein, 15 aa, Cricetulus griseus
EGYDFHSSSEFEIVK

SEQ ID NO: 851 - protein, 16 aa, Cricetulus griseus
AQYYLPDGSTEIGPSR

SEQ ID NO: 852 - protein, 18 aa, Cricetulus griseus
ACYLSINPQKDETLETEK

SEQ ID NO: 853 - protein, 22 aa, Cricetulus griseus
DQLQTFSEEHPVLLTEAPLNPR

SEQ ID NO: 854 - protein, 376 aa, Homo sapiens [sequence omitted]

SEQ ID NO: 855 - protein, 5 aa, Cricetulus griseus
FDHLR

SEQ ID NO: 856 - protein, 6 aa, Cricetulus griseus
QLPVTR

SEQ ID NO: 857 - protein, 6 aa, Cricetulus griseus
NFWNGR

SEQ ID NO: 858 - protein, 7 aa, Cricetulus griseus
RQLPVTR

SEQ ID NO: 859 - protein, 10 aa, Cricetulus griseus
LLLNNDNLLR

SEQ ID NO: 860 - protein, 13 aa, Cricetulus griseus
EHYPNGVCTVYGK

SEQ ID NO: 861 - protein, 17 aa, Cricetulus griseus
IQVHYYEDGNVQLVSHK

SEQ ID NO: 862 - protein, 284 aa, Homo sapiens
DLEEQLSDEEKVRIAAKFIIHAPPGEFNEVFNDVRLLLNNDNLLREGAAHAFAQYNLDQFTPVKIEGYEDQVLITEHGDLGNGKFLDPKNRICFKFDHLRKEATDPRPCEVENAVESWRTSVETALRAYVKEHYPNGVCTVYGKKIDGQQTIIACIESHQFQAKNFWNGRWRSEWKFTITPSTTQVVGILKIQVHYYEDGNVQLVSHKDIQDSLTVSNEVQTAKEFIKIVEAAENEYQTAISENYQTMSDTTFKALRRQLPVTRTKIDWNKILSYKIGKEMQNA

SEQ ID NO: 863 - protein, 6 aa, Cricetulus griseus
IHLDEK

SEQ ID NO: 864 - protein, 7 aa, Cricetulus griseus
LSDGIRK

SEQ ID NO: 865 - protein, 6 aa, Cricetulus griseus
IYNYYK

SEQ ID NO: 866 - protein, 8 aa, Cricetulus griseus
KFAADAIK

SEQ ID NO: 867 - protein, 9 aa, Cricetulus griseus
AAQTSDLGK

SEQ ID NO: 868 - protein, 8 aa, Cricetulus griseus
MFSAENGK

SEQ ID NO: 869 - protein, 9 aa, Cricetulus griseus
TIVMGASFR

SEQ ID NO: 870 - protein, 9 aa, Cricetulus griseus
TIVMGASFR

SEQ ID NO: 871 - protein, 10 aa, Cricetulus griseus
LGGPQEEQIK

SEQ ID NO: 872 - protein, 11 aa, Cricetulus griseus
SYEPQEDPGVK

SEQ ID NO: 873 - protein, 11 aa, Cricetulus griseus
LSFDKDAMVAR

SEQ ID NO: 874 - protein, 12 aa, Cricetulus griseus
LSSTWEGIQAGK

SEQ ID NO: 875 - protein, 337 aa, Cricetulus griseus
MSGSPVKRQRMESALDQLKQFTTVVADTGDFNAIDEYKPQDATTNPSLILAAAQMPAYQELVEEAIAYGKKLGGPQEEQIKNAIDKLFVLFGAEILKKIPGRVSTEVDARLSFDKDAMVARAKRLIELYKEAGISKDRILIKLSSTWEGIQAGKELEEQHGIHCNMTLLFSFAQAVACAEAGVTLISPFVGRILDWHVANTDKKSYEPQEDPGVKSVTKIYNYYKKFGYKTIVMGASFRNTGEIKALAGCDFLTISPKLLGELLKDNTKLAPVLSIKAAQTSDLGKIHLDEKAFRWLHSEDQMAVEKLSDGIRKFAADAIKLERMLTERMFSAENGK

SEQ ID NO: 876 - protein, 6 aa, Cricetulus griseus
ALVHER

SEQ ID NO: 877 - protein, 6 aa, Cricetulus griseus
QVDVFR

SEQ ID NO: 878 - protein, 7 aa, Cricetulus griseus
KQVDVFR

SEQ ID NO: 879 - protein, 8 aa, Cricetulus griseus
GEEKPSMY

SEQ ID NO: 880 - protein, 9 aa, Cricetulus griseus
CGFLPGNEK

SEQ ID NO: 881 - protein, 8 aa, Cricetulus griseus
ETHVMDYR

SEQ ID NO: 882 - protein, 10 aa, Cricetulus griseus
VEAFQTTISK

SEQ ID NO: 883 - protein, 11 aa, Cricetulus griseus
ASKETHVMDYR

SEQ ID NO: 884 - protein, 12 aa, Cricetulus griseus
TKVEAFQTTISK

SEQ ID NO: 885 - protein, 14 aa, Cricetulus griseus
IEDGNDFGVAIQEK

SEQ ID NO: 886 - protein, 15 aa, Cricetulus griseus
ALVHERDEAAYGELR

SEQ ID NO: 887 - protein, 239 aa, Canis familiaris
MAKPCALRLSGEARKQVDVFRQNLFQEAEEFLYRFLPQKIIHLNQLLQEDSLNVADLTSLRAPLDIPIPDPPPKDDEMETDKQEKKEVPKCGFLPGNEKVLALLALVKPEVWTLKEKCILVITWIQHLIPKIEDGNDFGVAIQEKVLERVNAVKTKVEAFQTTISKYFSERGDAVAKASKETHVMDYRALVHERDEAAYGELRAMVLDLRAFYAELYHIISSNLEKIINPKGEEKPSMY

SEQ ID NO: 888 - protein, 7 aa, Cricetulus griseus
RSELIAK

SEQ ID NO: 889 - protein, 8 aa, Cricetulus griseus
LRQPFFQK

SEQ ID NO: 890 - protein, 10 aa, Cricetulus griseus
VEVTEFEDIK

SEQ ID NO: 891 - protein, 11 aa, Cricetulus griseus
LNEQASEELIK

SEQ ID NO: 892 - protein, 13 aa, Cricetulus griseus
EFHLNESGDPSSK

SEQ ID NO: 893 - protein, 13 aa, Cricetulus griseus
IDFYDENPYFENK

SEQ ID NO: 894 - protein, 18 aa, Cricetulus griseus
EQQEAIEHIDEVQNEIDR

SEQ ID NO: 895 - protein, 252 aa, Bos taurus
KEQQEAIEHIDEVQNEIDRLNEQASEEILKVEQKYNKLRQPFFQKRSELIAKIPNFWVTTFVNHPQVSALLGEEDEEALHYLTRVEVTEFEDIKSGYRIDFYFDENPYFENKILSKEFHLNESGDPSSKSTEIKWKSGKDLTKRSSQTQNKASRKRQHEEPESFFTWFTDHSDAGADELGEVIKDDIWPNPLQYYLVPDMDDEEGEGEEDDDDDEEEEGLEDIDEEGDEDEGEEDEDDDEGEEGEEDEGEDD

SEQ ID NO: 896 - protein, 7 aa, Cricetulus griseus
VPFSLLR

SEQ ID NO: 897 - protein, 8 aa, Cricetulus griseus
RVPFSLLR

SEQ ID NO: 898 - protein, 8 aa, Cricetulus griseus
SPSWEPFR

SEQ ID NO: 899 - protein, 8 aa, Cricetulus griseus
DWYPAHSR

SEQ ID NO: 900 - protein, 10 aa, Cricetulus griseus
QLSSGVSEIR

SEQ ID NO: 901 - protein, 9 aa, Cricetulus griseus
QDEHGYISR

SEQ ID NO: 902 - protein, 10 aa, Cricetulus griseus
LFDQAFGVPR

SEQ ID NO: 903 - protein, 13 aa, Cricetulus griseus
EGVVEITGKHEER

SEQ ID NO: 904 - protein, 13 aa, Cricetulus griseus
HEERQDEHGYISR

SEQ ID NO: 905 - protein, 13 aa, Cricetulus griseus
QDEHGYISRCFTR

SEQ ID NO: 906 - protein, 205 aa, Rattus norvegicus; identical to SEQ ID NO: 329

SEQ ID NO: 907 - protein, 7 aa, Cricetulus griseus
ITAPPDR

SEQ ID NO: 908 - protein, 9 aa, Cricetulus griseus
APPTGASQK

SEQ ID NO: 909 - protein, 11 aa, Cricetulus griseus
FKAPPTGASQK

SEQ ID NO: 910 - protein, 15 aa, Cricetulus griseus
LLLASGRAFPCPLEK

SEQ ID NO: 911 - protein, 14 aa, Cricetulus griseus
LCYVALEPEEELSR

SEQ ID NO: 912 - protein, 15 aa, Cricetulus griseus
LCYVALEPEEELSRR

SEQ ID NO: 913 - protein, 377 aa, Mus musculus
MFNPLVLDSPSVIFDNGSGLCKAGLSGEIGPRHVTSSVVGYPKFKAPPTGASQKKYFVGEEALYKQEALSLHYPIDRGLVTSWDDVEKLWRHLFEWELGVKPCERPVLVTEPSLNPRENREKTAEMMFETFEVPAFYLSDQAVLALYSSACVTGLVVDSGDGVTCTVPIYEGYSLPHAVSKLYVAGKDITELLTRLLLASGRAFPCPLEKALADDIKEKLCYVALEPEEELSRRAEDVLREYKLPDGNVIYIGDQLYQAPEVLFSPDQLGTHGPGLAQMASNSITKCDADIQKTLFGEIVLSGGSTLFQGLDDRLLKELEQLASKGVPIKITAPPDRWFSTWIGASIVTSLSSFKQMWITAADFKEFGVSVVQRRCF

SEQ ID NO: 914 - protein, 9 aa, Cricetulus griseus
CMPTFQFYK

SEQ ID NO: 915 - protein, 13 aa, Cricetulus griseus
EAFQEALAAAGDK

SEQ ID NO: 916 - protein, 9 aa, Cricetulus griseus
VGEFSGANK

SEQ ID NO: 917 - protein, 105 aa, Mus musculus
MVKLIESKEAFQEALAAAGDKLVVVDFSATWCGPCKMIKPFFHSLCDKYSNVVFLEVDVDDCQDVAADCEVKCMPTFQFYKKGQKVGEFSGANKEKLEASITEYA

SEQ ID NO: 918 - protein, 9 aa, Cricetulus griseus
DIAANEENR

SEQ ID NO: 919 - protein, 6 aa, Cricetulus griseus
IGFEEK

SEQ ID NO: 920 - protein, 10 aa, Cricetulus griseus
GDYDAFFEAR

SEQ ID NO: 921 - protein, 13 aa, Cricetulus griseus
VYIASSSGSTAIK

SEQ ID NO: 922 - protein, 114 aa, Mus musculus
MVIRVYIASSSGSTAIKKKQQDVLCFLEANKIGFEEKDIAANEENRKWMRENVPEDSRPSTGYPLPPQIFNECQYRGDYDAFFEARENNAVYAFLGLTAPPGSKEAEAQANQQA

SEQ ID NO: 923 - protein, 8 aa, Cricetulus griseus
FSVSPVVR

SEQ ID NO: 924 - protein, 8 aa, Cricetulus griseus
YFDPANGK

SEQ ID NO: 925 - protein, 8 aa, Cricetulus griseus
GGGQPTAR

SEQ ID NO: 926 - protein, 10 aa, Cricetulus griseus
GEGQLGPAER

SEQ ID NO: 927 - protein, 9 aa, Cricetulus griseus
VFDAIMNFR

SEQ ID NO: 928 - protein, 9 aa, Cricetulus griseus
VFDAIMNFR

SEQ ID NO: 929 - protein, 9 aa, Cricetulus griseus
YEWDVAEAR

SEQ ID NO: 930 - protein, 10 aa, Cricetulus griseus
EGALCEENMR

SEQ ID NO: 931 - protein, 10 aa, Cricetulus griseus
VFDAIMNFRK

SEQ ID NO: 932 - protein, 9 aa, Cricetulus griseus
EDLYLKPQR

SEQ ID NO: 933 - protein, 12 aa, Cricetulus griseus
DSVVAGFQWATK

SEQ ID NO: 934 - protein, 12 aa, Cricetulus griseus
NMSVIAHVDHGK

SEQ ID NO: 935 - protein, 11 aa, Cricetulus griseus
KEDLYLKPIQR

SEQ ID NO: 936 - protein, 12 aa, Cricetulus griseus
TFCQLILDPIFK

SEQ ID NO: 937 - protein, 14 aa, Cricetulus griseus
ARPFPDGLAEDIDK

SEQ ID NO: 938 - protein, 14 aa, Cricetulus griseus
TGTITTFEHAHNMR

SEQ ID NO: 939 - protein, 14 aa, Cricetulus griseus
TGTITTFEHAHNMR

SEQ ID NO: 940 - protein, 16 aa, Cricetulus griseus
GPLMMYISKMVPTSDK

SEQ ID NO: 941 - protein, 19 aa, Cricetulus griseus
GHVFEESQVAGTPMPFVVK

SEQ ID NO: 942 - protein, 18 aa, Cricetulus griseus
CELLYEGPPDDEAAMGIK

SEQ ID NO: 943 - protein, 20 aa, Cricetulus griseus
ARPFPDGLAEDIDKGEVSAR

SEQ ID NO: 944 - protein, 18 aa, Cricetulus griseus
ALLELQLEPEELYQTFQR

SEQ ID NO: 945 - protein, 24 aa, Cricetulus griseus
VTDGALVVVDCVSGVCVQTETVLR

SEQ ID NO: 946 - protein, 858 aa, Cricetulus griseus; identical to SEQ ID NO: 658

SEQ ID NO: 947 - protein, 7 aa, Cricetulus griseus
NIGPLVK

SEQ ID NO: 948 - protein, 7 aa, Cricetulus griseus
FAYDGLK

SEQ ID NO: 949 - protein, 7 aa, Cricetulus griseus
MLRIPIK

SEQ ID NO: 950 - protein, 6 aa, Cricetulus griseus
VMNLHR

SEQ ID NO: 951 - protein, 6 aa, Cricetulus griseus
FCYHER

SEQ ID NO: 952 - protein, 10 aa, Cricetulus griseus
VAVTPPGLAR

SEQ ID NO: 953 - protein, 9 aa, Cricetulus griseus
FEAPLFNAR

SEQ ID NO: 954 - protein, 10 aa, Cricetulus griseus
SATYVNTEGR

SEQ ID NO: 955 - protein, 10 aa, Cricetulus griseus
LEEVSPNLVR

SEQ ID NO: 956 - protein, 11 aa, Cricetulus griseus
RALIGLSNSPK

SEQ ID NO: 957 - protein, 10 aa, Cricetulus griseus
DFYMTDSISR

SEQ ID NO: 958 - protein, 12 aa, Cricetulus griseus
GNDMQVGTYIEK

SEQ ID NO: 959 - protein, 13 aa, Cricetulus griseus
KPMVVLGSSALQR

SEQ ID NO: 960 - protein, 16 aa, Cricetulus griseus
FASEIAGVDDLGTTGR

SEQ ID NO: 961 - protein, 727 aa, Mus musculus
MLRIPIKRALIGLSNSPKGYVRTTGTAASNLIEVFVDGQSVMVEPGTTVLQACEKVGMQIPRFCYHERLSVAGNCRMCLVEIEKAPKVVAACAMPVMKGWNILTNSEKSKKAREGVMEFLLANHPLDCPICDQGGECDLQDQSMMFGSDRSRFLEGKRAVEDKNIGPLVKTIMTRCIQCTRCIRFASEIAGVDDLGTTGRGNDMQVGTYIEKMFMSELSGNVIDICPVGALTSKPYAFTARPWETRKTESIDVMDAVGSNIVVSTRTGEVMRILPRMHEDINEEWISDKTRFAYDGLKRQRLTEPMVRNEKGLLTYTSWEDALSRVAGMLQNFEGNAVAAIAGGLVDAEALVALKDLLNKVDSDNLCTEEIFPTEGAGTDLRSNYLLNTTIAGVEEADVVLLVGTNPRFEAPLFNARIRKSWLHNDLKVALIGSPVDLTYRYDHLGDSPKILQDIASGRHSFCEVLKDAKKPMVVLGSSALQRDDGAAILAAVSNMVQKIRVTTGVAAEWKVMNILHRIASQVAALDLGYKPGVEAIRKNPPKMLFLLGADGGCITRQDLPKDCFIVYQGHHGDVGAPMADVILPGAAYTEKSATYVNTEGRAQQTKVAVTPPGLAREDWKIIRALSEIAGITLPYDTLDQVRNRLEEVSPNLVRYDDIEETNYFQQASELAKLVNQEVLADPLVPPQLTIKDFYMTDSISRASQTMAKCVKAVTEGAQAVEEPSIC

SEQ ID NO: 962 - protein, 7 aa, Cricetulus griseus
VMEHFIK

SEQ ID NO: 963 - protein, 9 aa, Cricetulus griseus
ITITNDQNR

SEQ ID NO: 964 - protein, 10 aa, Cricetulus griseus
VYEGERPLTK

SEQ ID NO: 965 - protein, 12 aa, Cricetulus griseus
DAGTIAGLNVMR

SEQ ID NO: 966 - protein, 10 aa, Cricetulus griseus
FEELNMDLFR

SEQ ID NO: 967 - protein, 13 aa, Cricetulus griseus
SDIDEIVLGGSTR

SEQ ID NO: 968 - protein, 14 aa, Cricetulus griseus
TFAPEEISAMVLTK

SEQ ID NO: 969 - protein, 16 aa, Cricetulus griseus
IINEPTAAAIAYGLDK

SEQ ID NO: 970 - protein, 15 aa, Cricetulus griseus
NQLTSNPENTVFDAK

SEQ ID NO: 971 - protein, 17 aa, Cricetulus griseus
SQIFSTASDNQPTVTIK

SEQ ID NO: 972 - protein, 17 aa, Cricetulus griseus
VTHAVVTVPAYFNDAQR

SEQ ID NO: 973 - protein, 594 aa, Canis familiaris; identical to SEQ ID NO: 718

SEQ ID NO: 974 - protein, 7 aa, Cricetulus griseus
IVELMGR

SEQ ID NO: 975 - protein, 8 aa, Cricetulus griseus
MAFQKAVK

SEQ ID NO: 976 - protein, 8 aa, Cricetulus griseus
RVPIPVDR

SEQ ID NO: 977 - protein, 9 aa, Cricetulus griseus
GLKTALVER

SEQ ID NO: 978 - protein, 10 aa, Cricetulus griseus
TVGLFLQGGK

SEQ ID NO: 979 - protein, 11 aa, Cricetulus griseus
MNLAIALTAAR

SEQ ID NO: 980 - protein, 9 aa, Cricetulus griseus
FLYYEMGYK

SEQ ID NO: 981 - protein, 10 aa, Cricetulus griseus
ALEHFPMLQK

SEQ ID NO: 982 - protein, 9 aa, Cricetulus griseus
FLYYEMGYK

SEQ ID NO: 983 - protein, 10 aa, Cricetulus griseus
ALEHFPMLQK

SEQ ID NO: 984 - protein, 12 aa, Cricetulus griseus
EYACTAVDMISR

SEQ ID NO: 985 - protein, 13 aa, Cricetulus griseus
CKDVLTGQEFDVR

SEQ ID NO: 986 - protein, 16 aa, Cricetulus griseus
LVGAIVYYDGQHNDAR

SEQ ID NO: 987 - protein, 727 aa, Mus musculus
MAFQKAVKGTILVGGGALATVLGLSPFAHYRRKQVSLAYVEAAGYLTEPVNREPPSREAQLMTLKNTPEFDILVIGGGATGCGCALDAVTRGLKTALVERDDFSSGTSSRSTKLIHGGVRYLQKAIMNLDVEQYRMVKEALHERANLLEIAPHLSAPLPIMLPLYKWWQLPYYWVGIKMYDLVAGSQCLKSSYVLSKSRALEHFPMLQKDKLVGAIVYYDGQHNDARMNLAIALTAARYGAATANYMEVVSLLKKTDPETGKERVSGARCKDVLTGQEFDVRAKCVINASGPFTESVRKMDDKNVVPICQPSAGVHIVMPGYYSPENMGLLDPATSDGRVIFFLPWEKMTIAGTTDTPTDVTHHPIPSEEDINFILNEVRNYLSSDVEVRRGDVLAAWSGIRPLVTDPKSADTQSISRNHVVDISDSGLITIAGGKWTTYRSMAEDTVDAAVKFHNLNAGPSRTVGLFLQGGKDWSPTLYIRLVQDYGLESEVAQHLPKTYGDKAFEVAKMASVTGKRWPVVGVRLVSEFPYIEAEVKYGIKEYACTAVDMISRRTRLAFLNVQAAEEALPRIVELMGRELNWSELRKQEELETATRFLYYEMGYKSRTEQLTDSTEISLLPSDIDRYKKRFHKFDEDEKGFITIVDVQRVLESINVQMDENTLHEILCEVDLNKNGQVELHEFLQLMSAVQKGRVSGSRLAILMKTAEENLDRRVPIPVDRSCGGL

SEQ ID NO: 988 - protein, 6 aa, Cricetulus griseus
FQNAPR

SEQ ID NO: 989 - protein, 7 aa, Cricetulus griseus
QALPQVR

SEQ ID NO: 990 - protein, 8 aa, Cricetulus griseus
AQGWAPLK

SEQ ID NO: 991 - protein, 9 aa, Cricetulus griseus
FAAQAAQQR

SEQ ID NO: 992 - protein, 9 aa, Cricetulus griseus
FGIYDIDNK

SEQ ID NO: 993 - protein, 9 aa, Cricetulus griseus
DIVQFVPYR

SEQ ID NO: 994 - protein, 9 aa, Cricetulus griseus
SDPFLEFFR

SEQ ID NO: 995 - protein, 536 aa, Mus musculus
MAHCVTLVQLSVSCEHLIDKDIGSKSDPLCVLLQDVGGAWAEPCRTERVRNCSSPEFSKTLQIEYHFETVQKLRFGIYDIDNKTPELGDDDFLGGAECSLGQIVSSQTLTLPLMLKPGKPAGRGTITVSAQELKDSRVVTMEVEARNLDKKDFLGKSDPFLEFFRQGDGKWQLAYRTEVVKNNLNPTWKRFSVSLQHFCGGDLSTPIQVRCSDYDSDGSHDLIGTFHTTLAQLQAVPAEFECVHPEKQQRKKNYRNSGTVRVKTCRVETEYSFLDYVMGGCQINFTVGVDFTGSNGDPSSPDSLHYLSPTGVNEYLTALWSVGSVVQDYDSDKLFPAFGFGAQVPPDWQVSHEFALNFNPSNPYCAGIQGIVDAYRQALPQVRLYGPTNFAPIINHVARFAAQAAQQRSASQYFVLLLLTDGAVTDVEATCKAVVDASKLPMSVIIVGVGGADFEVMEQLDADGGPLRTRSGEAAARDIVQFVPYRRFQNAPRETLAQTVLAEVPTQMVSYFRAQGWAPLKAPPTPGKGPAQAPQA

SEQ ID NO: 996 - protein, 7 aa, Cricetulus griseus
LGVTYPK

SEQ ID NO: 997 - protein, 8 aa, Cricetulus griseus
VQQLAGQR

SEQ ID NO: 998 - protein, 9 aa, Cricetulus griseus
RVQQLAGQR

SEQ ID NO: 999 - protein, 10 aa, Cricetulus griseus
MLPAVTFEGK

SEQ ID NO: 1000 - protein, 9 aa, Cricetulus griseus
TLYQLQAER

SEQ ID NO: 1001 - protein, 11 aa, Cricetulus griseus
GMYQVGLPSQK

SEQ ID NO: 1002 - protein, 13 aa, Cricetulus griseus
VAVLLLAGGQGTR

SEQ ID NO: 1003 - protein, 507 aa, Rattus norvegicus; identical to SEQ ID NO: 129

SEQ ID NO: 1004 - protein, 8 aa, Cricetulus griseus
APGFGDNR

SEQ ID NO: 1005 - protein, 9 aa, Cricetulus griseus
VTDALNATR

SEQ ID NO: 1006 - protein, 9 aa, Cricetulus griseus
APGFGDNAK

SEQ ID NO: 1007 - protein, 12 aa, Cricetulus griseus
NAGVEGSLIVEK

SEQ ID NO: 1008 - protein, 13 aa, Cricetulus griseus
TVIIIEQSWGSPK

SEQ ID NO: 1009 - protein, 12 aa, Cricetulus griseus
GYISPYFINTSK

SEQ ID NO: 1010 - protein, 13 aa, Cricetulus griseus
TLNDELEIIEGMK

SEQ ID NO: 1011 - protein, 13 aa, Cricetulus griseus
CEFQDAYVLLSEK

SEQ ID NO: 1012 - protein, 17 aa, Cricetulus griseus
AAVEEGIVLGGGCALLR

SEQ ID NO: 1013 - protein, 19 aa, Cricetulus griseus
DPGMGAMGGMGGGMGGGMF

SEQ ID NO: 1014 - protein, 18 aa, Cricetulus griseus
ISSVQSIVPALEIANAHR

SEQ ID NO: 1015 - protein, 16 aa, Cricetulus griseus
TLNDELEIIEGMKFDR

SEQ ID NO: 1016 - protein, 19 aa, Cricetulus griseus
KISSVQSIVPALEIANAHR

SEQ ID NO: 1017 - protein, 20 aa, Cricetulus griseus
IPAMTIAKNAGVEGSLIVEK

SEQ ID NO: 1018 - protein, 21 aa, Cricetulus griseus
ALMLQGVDLLADAVAVTMGPK

SEQ ID NO: 1019 - protein, 22 aa, Cricetulus griseus
KPLVIIAEDVDGEALSTLVLNR

SEQ ID NO: 1020 - protein, 23 aa, Cricetulus griseus
QSKPVTTPEEIAQVATISANGDK

SEQ ID NO: 1021 - protein, 25 aa, Cricetulus griseus
LVQDVANNTNEEAGDGTTTATVLAR

SEQ ID NO: 1022 - protein, 573 aa, Mus musculus
MLRLPTVLRQMRPVSRALAPHLTRAYAKDVKFGADARALMLQGVDLLADAVAVTMGPKGRTVIIEQSWGSPKVTKDGVTVAKSIDLKDKYKNIGAKLVQDVANNTNEEAGDGTTTATVLARSIAKEGFEKISKGANPVEIRRGVMLAVDAVIAELKKQSKPVTTPEEIAQVATISANGDKDIGNIISDAMKKVGRKGVITVKDGKTLNDELEIIEGMKFDRGYISPYFINTSKGQKCEFQDAYVLLSEKKISSVQSIVPALEIANAHRKPLVIIAEDVDGEALSTLVLNRLKVGLQVVAVKAPGFGDNRKNQLKDMAIATGGAVFGEEGLNLNLEDVQAHDLGKVGEVIVTKDDAMLLKGKGDEAHIEKRIQEITEQLDITTSEYEKEKLNERLAKLSDGVAVLKVGGTSDVEVNEKKDRVTDALNATRAAVEEGIVLGGGCALLRCIPALDSLKPANEDQKIGIEIIKRALKIPAMTIAKNAGVEGSLIVEKILQSSSEVGYDAMLGDFVNMVEKGIIDPTKVVRTALLDAAGVASLLTTAEAVVTEIPKEEKDPGMGAMGGMGGGMGGGMF

SEQ ID NO: 1023 - protein, 9 aa, Cricetulus griseus
EDAANNYAR

SEQ ID NO: 1024 - protein, 9 aa, Cricetulus griseus
EIIDLVLDR

SEQ ID NO: 1025 - protein, 12 aa, Cricetulus griseus
QLFHPEQLITGK

SEQ ID NO: 1026 - protein, 15 aa, Cricetulus griseus
AVFVDLEPTVIDEVR

SEQ ID NO: 1027 - protein, 14 aa, Cricetulus griseus
NLDIERPTYTNLNR

SEQ ID NO: 1028 - protein, 18 aa, Cricetulus griseus
VGINYQPPTVVPGGDLAK

SEQ ID NO: 1029 - protein, 20 aa, Cricetulus griseus
TIGGGDDSFNTFFSETGAGK

SEQ ID NO: 1030 - protein, 450 aa, Cricetulus griseus
RECISIHVGQAGVQIGNACWELYCLEHGIQPDGQMPSDKTIGGGDDSFNTFFSETGAGKHVPRAVFVDLEPTVIDEVRTGTYRQLFHPEQLITGKEDAANNYARGHYTIGKEIIDLVLDRIRKLADQCTGLQGFLVFHSFGGGTGSGFTSLLMERLSVDYGKKSKLEFSIYPAPQVSTAVVEPYNSILTTHTTLEHSDCAFMVDNEAIYDICRRNLDIERPTYTNLNRLISQIVSSITASLRFDGALNVDLTEFQTNLVPYPRIHFPLATYAPVISAEKAYHEQLSVAEITNACFEPANQMVKCDPRHGKYMACCLLYRGDVVPKDVNAAIATIKTKRSIQFVDWCPTGFKVGINYQPPTVVPGGDLAKVQRAVCMLSNTTAIAEAWARLDHKFDLMYAKRAFVHWYVGEGMEEGEFSEAREDMAALEKDYEEVGVDSVEGEGEEEGEEY

SEQ ID NO: 1031 - protein, 6 aa, Cricetulus griseus
YEVHLK

SEQ ID NO: 1032 - protein, 7 aa, Cricetulus griseus
FSFDLGK

SEQ ID NO: 1033 - protein, 8 aa, Cricetulus griseus
FDSSLDRK

SEQ ID NO: 1034 - protein, 9 aa, Cricetulus griseus
DKFSFDLGK

SEQ ID NO: 1035 - protein, 8 aa, Cricetulus griseus
LYANMFER

SEQ ID NO: 1036 - protein, 10 aa, Cricetulus griseus
YTQWLLDGTK

SEQ ID NO: 1037 - protein, 10 aa, Cricetulus griseus
FQIPPHAELR

SEQ ID NO: 1038 - protein, 10 aa, Cricetulus griseus
LEQSNIVKER

SEQ ID NO: 1039 - protein, 13 aa, Cricetulus griseus
LQAFSAAIESCNK

SEQ ID NO: 1040 - protein, 14 aa, Cricetulus griseus
GEDLTEDEDGGIIR

SEQ ID NO: 1041 - protein, 15 aa, Cricetulus griseus
RGEAHLAVNDFDLAR

SEQ ID NO: 1042 - protein, 23 aa, Cricetulus griseus
VGEVCHITCKPEYAYGSAGSPPK

SEQ ID NO: 1043 - protein, 402 aa, Rattus norvegicus
YTGWLLDGTKFDSSLDRKDKFSFDLGKGEVIKAWDIAVATMKVGEVCHITCKPEYAYGSAGSPPKIPPNATLVFEVELFEFKGEDLTEDEDGGIIRRIRTRGEGYARPNDGAMVEVALEGYYNDRLFDQRELCFEVGEGESLDLPCGLEEAIQRMEKGEHSIVYLKPSYAFGSVGKERFQIPPHAELRYEVHLKSFEKAKASWEMNSEEKLEQSNIVKERGTVYFKEGKYKQALLQYKKIVSWLEYESSFSGEEMQKVHALRLASHLNLAMCHLKLQAFSAAIESCNKALELDSNNEKGLFRRGEAHLAVNDFDLARADFQKVLQLYPSNKAAKTQLAVCQQRTRRQLAREKKLYANMFERLAEEEHKAKTEVAAGDHPTDAEMKGEPNNVAGNQAQVKTEA

SEQ ID NO: 1044 - protein, 7 aa, Cricetulus griseus
CYVHIMK

SEQ ID NO: 1045 - protein, 9 aa, Cricetulus griseus
DCLIGSGQR

SEQ ID NO: 1046 - protein, 9 aa, Cricetulus griseus
SELIPYLVR

SEQ ID NO: 1047 - protein, 10 aa, Cricetulus griseus
QFSSASSQQR

SEQ ID NO: 1048 - protein, 11 aa, Cricetulus griseus
DFIGVDSTGKR

SEQ ID NO: 1049 - protein, 11 aa, Cricetulus griseus
KQFSSASSQQR

SEQ ID NO: 1050 - protein, 11 aa, Cricetulus griseus
AYDASLAMLMR

SEQ ID NO: 1051 - protein, 9 aa, Cricetulus griseus
YWDFLMENK

SEQ ID NO: 1052 - protein, 12 aa, Cricetulus griseus
VSTLGLYMEANR

SEQ ID NO: 1053 - protein, 12 aa, Cricetulus griseus
AYDASLAMLMRK

SEQ ID NO: 1054 - protein, 452 aa, Rattus norvegicus
MEFQAVVMAVGGGSRMTDLTSSIPKPLLPVGNKPLIWYPLNLLERVGFEEVIVVTTKDVQKALCAEFKMKLKPDIVCIPDEADMGTADSLRHIYPKLKTDVLVLGCDLITDVALHEVVDLFRAYDASLAMLMRKGQESTEPVPGQKGKKKTVEQRDFIGVDSTGKRLLFMANEADLDEELVIKGSILQKHPRIHFQTGLVDAHLYCLKKYVVDFLMENKSITSIRSELIPYLVRKQFSSASSQQRQEDKEEDLKKKEPKSLDIYSFIKKDNTLTLAPYDACWNAFRRDKWEDLSRSQVRCYVHIMKEGLCSRVSTLGLYMEANRQVPKLLSVLCPEESMIHPSAQIANKHLIGADSLIGSDTQVGEKSSIKRSVIGSSCVIRDRVTVTNCLLMNSVTVEEGSSIHGSVICNNAVVEAGAEIRDCLIGSGQRIEAKAKRMNEVIVGNDQLMEI

SEQ ID NO: 1055 - protein, 7 aa, Cricetulus griseus
LADLIER

SEQ ID NO: 1056 - protein, 8 aa, Cricetulus griseus
TIEEVVGR

SEQ ID NO: 1057 - protein, 9 aa, Cricetulus griseus
VVGNPFDSR

SEQ ID NO: 1058 - protein, 10 aa, Cricetulus griseus
YGLAAAVFTK

SEQ ID NO: 1059 - protein, 11 aa, Cricetulus griseus
LLCGGGAAADR

SEQ ID NO: 1060 - protein, 12 aa, Cricetulus griseus
EEIFGPVMQILK

SEQ ID NO: 1061 - protein, 13 aa, Cricetulus griseus
GYFIQPTVFGDVK

SEQ ID NO: 1062 - protein, 13 aa, Cricetulus griseus
TEQGPQVDETQFK

SEQ ID NO: 1063 - protein, 13 aa, Cricetulus griseus
TIPIDGDFFSYTR

SEQ ID NO: 1064 - protein, 14 aa, Cricetulus griseus
ELGEYGLQAYTEVK

SEQ ID NO: 1065 - protein, 14 aa, Cricetulus griseus
TFVQEDVYDEFVER

SEQ ID NO: 1066 - protein, 17 aa, Cricetulus griseus
VAEQTPLTALYVANLIK

SEQ ID NO: 1067 - protein, 21 aa, Cricetulus griseus
TFPTVNPSTGEVICQVAEGSK

SEQ ID NO: 1068 - protein, 23 aa, Cricetulus griseus
VAFTGSTEVGHLIQVAAGSSNLK

SEQ ID NO: 1069 - protein, 500 aa, Mesocricetus auratus
SAAATSAVPAPNQQPEVFCNQIFINNEWHDAVSKKTFPTVNPSTGEVICQVAEGSKEDVDKAVKAARAAFQLGSPWRRMDASDRGRLLNRLADLIERDRTYLAALETLDNGKPYVISYLVDLDMVLKCLRYYAGWADKYHGKTIPIDGDFFSYTRHEPVGVCGQIIPWNFPLLMQAWKLGPALATGNVVVMKVAEQTPLTALYVANLIKEAGFPPGVVNIVPGFGPTAGAAIASHEDVDKVAFTGSTEVGHLIQVAAGSSNLKRVTLELGGKSPNIIMSDADMDWAVEQAHFALFFNQGQCCCAGSRTFVQEDVYDEFVERSVARAKSRVVGNPFDSRTEQGPQVDETQFKKILGYIKSGQQEGAKLLCGGGAAADRGYFIQPTVFGDVKDGMTIAKEEIFGPVMQILKFKTIEEVVGRANNSKYGLAAAVFTKDLDKANYLSQALQAGTVWINCYDVFGAQSPFGGYKMSGSGRELGEYGLQAYTEVKTVTIKVPQKNS

SEQ ID NO: 1070 - protein, 6 aa, Cricetulus griseus
NIFDQR

SEQ ID NO: 1071 - protein, 6 aa, Cricetulus griseus
LFDIYK

SEQ ID NO: 1072 - protein, 7 aa, Cricetulus griseus
HVGHLLR

SEQ ID NO: 1073 - protein, 8 aa, Cricetulus griseus
GSLDQNRR

SEQ ID NO: 1074 - protein, 8 aa, Cricetulus griseus
ASYILMEK

SEQ ID NO: 1075 - protein, 8 aa, Cricetulus griseus
KVQQELSR

SEQ ID NO: 1076 - protein, 9 aa, Cricetulus griseus
AIENELLDR

SEQ ID NO: 1077 - protein, 12 aa, Cricetulus griseus
QLEELAQQAIDR

SEQ ID NO: 1078 - protein, 13 aa, Cricetulus griseus
SDYMFQCSADGSK

SEQ ID NO: 1079 - protein, 474 aa, Rattus norvegicus
MATSWGSILQDEKQLEELAQQAIDRALAEGVLLRSAKNPSSSDVVTYAPFTLFPSPVPSTLLEQAYAVQMDFNILVDAVSQNSAFLEQTLSSTIKKDEYTARLFDIYKQVLKEGIAQTVFLGLNRSDYMFQCSADGSKALKQIEINTISASFGGLASRTPAVHRHVLNVLNKTNEASKILSNNPSKGLALGIAKAWELYGSANAVVLLIAQEKERNIFDQRAIENELLDRKIHVIRRRFEDVSERGSLDQNRRLFMEDQEVAVVYFRDGYMPSQYNAQNWEARLLLERSCAAKCPDIATQLAGTKKVQQELSRVGLLEALLPGQPEAVARLRATFAGLYSLDMGEEGDQAVAEALAAPSHFVLKPQREGGGNNFYGEEMVHALEQLKDSEERASYILMEKIEPEPFRNCLLRPGSPAQVVQCISELGIFGVYVRQGTTLVMNKHVGHLLRTKAIEHADGGVAAGVAVLDNPYPV

SEQ ID NO: 1080 - protein, 6 aa, Cricetulus griseus
EQTKGK

SEQ ID NO: 1081 - protein, 7 aa, Cricetulus griseus
GDSSSKK

SEQ ID NO: 1082 - protein, 6 aa, Cricetulus griseus
ELSFGR

SEQ ID NO: 1083 - protein, 10 aa, Cricetulus griseus
NKPEDYQGGR

SEQ ID NO: 1084 - protein, 14 aa, Cricetulus griseus
TGEAIVDAALSALR

SEQ ID NO: 1085 - protein, 13 aa, Cricetulus griseus
GSFSEQGINEFLR

SEQ ID NO: 1086 - protein, 17 aa, Cricetulus griseus
HQSLGGQYGVQGFPTIK

SEQ ID NO: 1087 - protein, 440 aa, Rattus norvegicus; identical to SEQ ID NO: 6

SEQ ID NO: 1088 - protein, 8 aa, Cricetulus griseus
VLVPATDR

SEQ ID NO: 1089 - protein, 10 aa, Cricetulus griseus
YLTTAVITNK

SEQ ID NO: 1090 - protein, 9 aa, Cricetulus griseus
MLFDYLADK

SEQ ID NO: 1091 - protein, 9 aa, Cricetulus griseus
QEYLDTLYR

SEQ ID NO: 1092 - protein, 12 aa, Cricetulus griseus
NLYSDDIPHALR

SEQ ID NO: 1093 - protein, 13 aa, Cricetulus griseus
IHQCISINMLADK

SEQ ID NO: 1094 - protein, 18 aa, Cricetulus griseus
ETIDNNSVSSPLQSLQQR

SEQ ID NO: 1095 - protein, 20 aa, Cricetulus griseus
LGHVVMGNNAVSPYQQVIEK

SEQ ID NO: 1096 - protein, 19 aa, Cricetulus griseus
LASEILMQNWDAAMEDLTR

SEQ ID NO: 1097 - protein, 19 aa, Cricetulus griseus
FQYECGNYSGAAEYLYFFR

SEQ ID NO: 1098 - protein, 445 aa, Homo sapiens [sequence omitted]

SEQ ID NO: 1099 - protein, 6 aa, Cricetulus griseus
DNDKTR

SEQ ID NO: 1100 - protein, 6 aa, Cricetulus griseus
EIFDSR

SEQ ID NO: 1101 - protein, 6 aa, Cricetulus griseus
YNQILR

SEQ ID NO: 1102 - protein, 10 aa, Cricetulus griseus
IGAEVYHNLK

SEQ ID NO: 1103 - protein, 15 aa, Cricetulus griseus
VNQIGSVTESLQACK

SEQ ID NO: 1104 - protein, 18 aa, Cricetulus griseus
AAVPSGASTGIYEALELR

SEQ ID NO: 1105 - protein, 16 aa, Cricetulus griseus
YITPDQLADLYKSFIR

SEQ ID NO: 1106 - protein, 19 aa, Cricetulus griseus
DATNVGDEGGFAPNILENK

SEQ ID NO: 1107 - protein, 20 aa, Cricetulus griseus
AGYTDKVVIGMDIAASEFFR

SEQ ID NO: 1108 - protein, 400 aa, Canis familiaris
MGGQKVTMSILKIHAREIFDSRGNPTVEVDLYTSKGLFRAAVPSGASTGIYEALELRDNDKTRYMGKGVSKAVEHINKTIAPALVSKKVNVVEQEKIDKLMIKMDGTENKSKFGANAILECPWLSARRGLSRRGCPCGSHAGNKLAMQEFMILPVGAANFKEAMRIGAEVYHNLKNVIKEKYGKDATNVGDEGGFAPNILENKEALELLKNAIGKAGYTDKVVIGMDIAASEFFRYITPDQLADLYKSFIRNYPVASFEDPFNQDDWEVWQNFTASAGIQVVGDDLTVTNPKQISKAVGKKSCNCLLLKVNQIGSVTESLQACKLAQSNGWGVMVSHRSGETKDTFIADLVVGLCTGQVKTGAPCRSERLAKYNQILRIEEELGSKAKFVGRSFRNPLAK

SEQ ID NO: 1109 - protein, 6 aa, Cricetulus griseus
TNFFEK

SEQ ID NO: 1110 - protein, 7 aa, Cricetulus griseus
EATYGER

SEQ ID NO: 1111 - protein, 7 aa, Cricetulus griseus
RVGEYQR

SEQ ID NO: 1112 - protein, 9 aa, Cricetulus griseus
QYIEFVADR

SEQ ID NO: 1113 - protein, 10 aa, Cricetulus griseus
HLVHKPSEQR

SEQ ID NO: 1114 - protein, 11 aa, Cricetulus griseus
FSQEVQITEAR

SEQ ID NO: 1115 - protein, 16 aa, Cricetulus griseus
ENTPPALSGTRVLASK

SEQ ID NO: 1116 - protein, 15 aa, Cricetulus griseus
TKVLAPSAEEEPLLR

SEQ ID NO: 1117 - protein, 394 aa, Canis familiaris
MLSVRVPLATIADPQQQQQQQLQLSPLKGLSLADKENTPPALSGTRVLASKTARRIFQEPAEPKTKVLAPSAEEEPLLRENPRRFVIFPIEYHDIWQMYKKAEASFWTAEEVDLSKDIQHWESLKPEERYFISHVLAFFAASDGIVNENLVERFSQEVQITEARCFYGFQIAMENIHSEMYSLLIDTYIKDSKEREFLFNAIETMPCVKKKADWALRWIGDKEATYGERVVAFAAVEGIFFSGSFASIFWLKKRGLMPGLTFSNELISRDEGLHCDFACLMFKHLVHKPSEQRVKEIIINAVRIEQEFLTEALPVKLIGMNCTLMKQYIEFVADRLMLELGFSKVFRVENPFDFMENISLEGKTNFFEKRVGEYQRMGVMSSPTENSFTLDADF

SEQ ID NO: 1118 - protein, 6 aa, Cricetulus griseus
YLVEFR

SEQ ID NO: 1119 - protein, 8 aa, Cricetulus griseus
VPQCPSGR

SEQ ID NO: 1120 - protein, 9 aa, Cricetulus griseus
GTTVTPDKR

SEQ ID NO: 1121 - protein, 9 aa, Cricetulus griseus
RVPQCPSGR

SEQ ID NO: 1122 - protein, 9 aa, Cricetulus griseus
TDQDEEHCR

SEQ ID NO: 1123 - protein, 11 aa, Cricetulus griseus
AMQNNAKSDPK

SEQ ID NO: 1124 - protein, 10 aa, Cricetulus griseus
TDQDEEHCRK

SEQ ID NO: 1125 - protein, 16 aa, Cricetulus griseus
SQSAAVTPSSTTSSAR

SEQ ID NO: 1126 - protein, 407 aa, Rattus norvegicus
MTTSGALFPSLVPGSRGSSTKYLVEFRAGKMSLKGTTVTPDKRKGLVYIQQTDDSLIHFCWKDRTSGTVEDDLIIFPDDCEFKRVPQCPSGRVYVLKFKAGSKRLFFWMQEPKTDQDEEHCRKVNECLNNPPMPGTLGASGSSGHELSALGGEGGLQSLLGNMSHSQLMQLIGPAGLGGLGGLGALTGPGLASLLGSSGPPASSSSSSSRSQSAAVTPSSTTSSARATPAPSAPAAASATSPSPAPSSGNGTSTAASPTQPIQLSDLQSILATMNVPAGPGGSQQVDLASVLTPEIMAPILANADVQERLLPYLPSGESLPQTAEEIQNTLTSPQFQQALGMFSAALASGQLGPLMCQFGLPAEAVEAANKGDVEAFAKAMQNNAKSDPKEGDTKDKKDEEEDMSLD

SEQ ID NO: 1127 - protein, 7 aa, Cricetulus griseus
LQAIQQR

SEQ ID NO: 1128 - protein, 7 aa, Cricetulus griseus
RIEYPLK

SEQ ID NO: 1129 - protein, 7 aa, Cricetulus griseus
FHEFVEK

SEQ ID NO: 1130 - protein, 7 aa, Cricetulus griseus
FLYYDEK

SEQ ID NO: 1131 - protein, 11 aa, Cricetulus griseus
SYSFPTRPIPR

SEQ ID NO: 1132 - protein, 13 aa, Cricetulus griseus
LYLQQTLNDTVGR

SEQ ID NO: 1133 - protein, 349 aa, Mus musculus
MAATAAEVAASGSGEAREEAEAPGPAWDESQLRSYSFPTRPIPRLSQSDPRAEELIENEEPVVLTDTNLVYPALKWDLEYLQENIGNGDFSVYSASTHKFLYYDEKKMGNFQNFKPRSNREEIKFHEFVEKLQAIQQRGGEERLYLQQTLNDTVGRKIVMDFLGFNWNWINKQQGKRGWGQLTSNLLLIGMEGNVTPAHYDEQQNFFAQIKGHKRCILFPPDQFECLYPYPVHHPCDRQSQVDFDNPDYERFPNFRNVVGYETVVGPGDVLYIPMYWWHHIESLLNGGITITVNFWYKGAPTPKRIEYPLKAHQKVAIMRNIEKMLGEALGNPQEVGPLLNTMIKGRYN

SEQ ID NO: 1134 - protein, 6 aa, Cricetulus griseus
CDVDIR

SEQ ID NO: 1135 - protein, 7 aa, Cricetulus griseus
IIAPPER

SEQ ID NO: 1136 - protein, 7 aa, Cricetulus griseus
RGILTLK

SEQ ID NO: 1137 - protein, 10 aa, Cricetulus griseus
AGFAGDDAPR

SEQ ID NO: 1138 - protein, 10 aa, Cricetulus griseus
GYSFTTTAER

SEQ ID NO: 1139 - protein, 11 aa, Cricetulus griseus
EITALAPSTMK

SEQ ID NO: 1140 - protein, 11 aa, Cricetulus griseus
DSYVGDEAQSK

SEQ ID NO: 1141 - protein, 11 aa, Cricetulus griseus
AVFPSIVGRPR

SEQ ID NO: 1142 - protein, 13 aa, Cricetulus griseus
QEYDESGPSIVHR

SEQ ID NO: 1143 - protein, 16 aa, Cricetulus griseus
SYELPDGQVITIGNER

SEQ ID NO: 1144 - protein, 18 aa, Cricetulus griseus
VAPEEHPVLLTEAPLNPK

SEQ ID NO: 1145 - protein, 21 aa, Cricetulus griseus
DLYANTVLSGGTTMYPGIADR

SEQ ID NO: 1146 - protein, 22 aa, Cricetulus griseus
KDLYANTVLSGGTTMYPGIADR

SEQ ID NO: 1147 - protein, 375 aa, Cricetulus griseus
MDDDIAALVVDNGSGMCKAGFAGDDAPRAVFPSIVGRPRHQGVMVGMGQKDSYVGDEAQSKRGILTLKYPIEHGIVTNWDDMEKIWHHTFYNELRVAPEEHPVLLTEAPLNPKANREKMTQIMFETFNTPAMYVAIQAVLSLYASGRTTGIVMDSGDGVTHTVPIYEGYALPHAILRLDLAGRDLTDYLMKILTERGYSFTTTAEREIVRDIKEKLCYVALDFEQEMATAASSSSLEKSYELPDGQVITIGNERFRCPEALFQPSFLGMESCGIHETTFNSIMKCDVDIRKDLYANTVLSGGTTMYPGIADRMQKEITALAPSTMKIKIIAPPERKYSVWIGGSILASLSTFQEMWISKQEYDESGPSIVHRKCF

SEQ ID NO: 1148 - protein, 8 aa, Cricetulus griseus
WMIPPEAK

SEQ ID NO: 1149 - protein, 8 aa, Cricetulus griseus
APIQWEER

SEQ ID NO: 1150 - protein, 9 aa, Cricetulus griseus
MSDGLFLQK

SEQ ID NO: 1151 - protein, 10 aa, Cricetulus griseus
HMGLFDHAAK

SEQ ID NO: 1152 - protein, 10 aa, Cricetulus griseus
IAEFAFEYAR

SEQ ID NO: 1153 - protein, 10 aa, Cricetulus griseus
CSDFTEEICR

SEQ ID NO: 1154 - protein, 12 aa, Cricetulus griseus
TRYTDVNIVTIR

SEQ ID NO: 1155 - protein, 11 aa, Cricetulus griseus
CSDFTEEICRR

SEQ ID NO: 1156 - protein, 13 aa, Cricetulus griseus
WMIPPEAKESMDK

SEQ ID NO: 1157 - protein, 15 aa, Cricetulus griseus
TPIAAGHPSMNLLLR

SEQ ID NO: 1158 - protein, 366 aa, Rattus norvegicus
MAGSAWVSKVSRLLGAFHNTKQVTRGFAGGVQTVTLIPGDGIGPEISASVMKIFDAAKAPIQWEERNVTAIQGPGGKWMIPPEAKESMDKNKMGLKGPLKTPIAAGHPSMNLLLRKTFDLYANVRPCVSIEGYKTPYTDVNIVTIRENTEGEYSGIEHVIVDGVVQSIKLITEGASKRIAEFAFEYARNNHRSNVTAVHKANIMRMSDGLFLQKCREVAENCKDIKFNEMYLDTVCLNMVQDPSQFDVLVMPNLYGDILSDLCAGLIGGLGVTQSGNIGANGVAIFESVHGTAPDIAGKDMANPTALLLSAVMMLRHMGLFDHAAKIEAACFATIKDGKSLTKDLGGNSKCSDFTEEICRRVKDLD

SEQ ID NO: 1159 - protein, 8 aa, Cricetulus griseus
APIQWEER

SEQ ID NO: 1160 - protein, 9 aa, Cricetulus griseus
LITEEASRR

SEQ ID NO: 1161 - protein, 10 aa, Cricetulus griseus
IAEFAFEYAR

SEQ ID NO: 1162 - protein, 10 aa, Cricetulus griseus
CSDFTEEICR

SEQ ID NO: 1163 - protein, 12 aa, Cricetulus griseus
TPYTDVNIVTIR

SEQ ID NO: 1164 - protein, 15 aa, Cricetulus griseus
TPIAAGHPSMNLLLR

SEQ ID NO: 1165 - protein, 18 aa, Cricetulus griseus
TFDLYANVRPCVSIEGYK

SEQ ID NO: 1166 - protein, 23 aa, Cricetulus griseus
ENTEGEYSGIEHVIVDGVVQSIK

SEQ ID NO: 1167 - protein, 316 aa, Canis familiaris
MKIFDAAKAPIQWEERNVTAIQGPGGKWMIPPEAKESMDKNKMGLKGPLKTPIAAGHPSMNLLLRKTFDLYANVRPCVSIEGYKTPYTDVNIVTIRENTEGEYSGIEHVIVDGVVQSIKLITEEASRRIAEFAFEYARNNHRSNVTAVHKANIMRMSDGLFLQKCREVAENCKDIKFNEMYLDTVCLNMVQDPSQFDVLVMPNLYGDILSDLCAGLIGGLGVTPSGNIGANGVAIFESVHGTAPDIAGKDMANPTALLLSAVMMLRHMGLFDHAARVEAACFATIKDGKSLTKDLGGNAKCSDFTEEICRRVRDLD

SEQ ID NO: 1168 - protein, 7 aa, Cricetulus griseus
NVVVIPK

SEQ ID NO: 1169 - protein, 8 aa, Cricetulus griseus
VAIDAGYR

SEQ ID NO: 1170 - protein, 8 aa, Cricetulus griseus
ILNKPGLK

SEQ ID NO: 1171 - protein, 8 aa, Cricetulus griseus
TSAQVLIR

SEQ ID NO: 1172 - protein, 9 aa, Cricetulus griseus
KTSAQVLIR

SEQ ID NO: 1173 - protein, 9 aa, Cricetulus griseus
REDLFIVSK

SEQ ID NO: 1174 - protein, 13 aa, Cricetulus griseus
ALGVSNFNHFQIE

SEQ ID NO: 1175 - protein, 18 aa, Cricetulus griseus
HKPVTNQVECHPVLTQEK

SEQ ID NO: 1176 - protein, 316 aa, Cricetulus griseus; identical to SEQ ID NO: 603

SEQ ID NO: 1177 - protein, 7 aa, Cricetulus griseus
YKEEFEK

SEQ ID NO: 1178 - protein, 7 aa, Cricetulus griseus
YHEEFEK

SEQ ID NO: 1179 - protein, 9 aa, Cricetulus griseus
TQDQISNIK

SEQ ID NO: 1180 - protein, 10 aa, Cricetulus griseus
EPAAPVSIQR

SEQ ID NO: 1181 - protein, 10 aa, Cricetulus griseus
QQSELQSQVR

SEQ ID NO: 1182 - protein, 13 aa, Cricetulus griseus
MGPSGGEGVEPER

SEQ ID NO: 1183 - protein, 13 aa, Cricetulus griseus
GFSVVADTPELQR

SEQ ID NO: 1184 - protein, 14 aa, Cricetulus griseus
MGPSGGEGVEPERR

SEQ ID NO: 1185 - protein, 14 aa, Cricetulus griseus
QSFTMVADTPENLR

SEQ ID NO: 1186 - protein, 205 aa, Mus musculus
KQSFTMVADTPENLRLKQQSELQSQVRYKEEFEKNKGKGFSVVADTPELQRIKKTQDQISNIKYHEEFEKSRMGPSGGEGVEPERREAQDSSSYRRPTEQQQPQPHHIPTSAPVYQQPQQQQMTSSYGGYKEPAAPVSIQRSAPGGGGKRYRAVYDYSAADEDEVSFQDGDTIVNVQQIDDGWMYGTVERTGDTGMLPANYVEAI

SEQ ID NO: 1187 - protein, 6 aa, Cricetulus griseus
TPEELR

SEQ ID NO: 1188 - protein, 7 aa, Cricetulus griseus
ADAETLR

SEQ ID NO: 1189 - protein, 8 aa, Cricetulus griseus
LYDAYELK

SEQ ID NO: 1190 - protein, 10 aa, Cricetulus griseus
LIVALMKPSR

SEQ ID NO: 1191 - protein, 11 aa, Cricetulus griseus
GAGTDDHTLIR

SEQ ID NO: 1192 - protein, 10 aa, Cricetulus griseus
MLVVLLQANR

SEQ ID NO: 1193 - protein, 11 aa, Cricetulus griseus
NFATSLYSMIK

SEQ ID NO: 1194 - protein, 15 aa, Cricetulus griseus
ETSGNLEQLLLAVVK

SEQ ID NO: 1195 - protein, 16 aa, Cricetulus griseus
GLGTDEESILTLLTSR

SEQ ID NO: 1196 - protein, 15 aa, Cricetulus griseus
SIPAYLAETLYYAMK

SEQ ID NO: 1197 - protein, 15 aa, Cricetulus griseus
YMTISGFQIEETIDR

SEQ ID NO: 1198 - protein, 320 aa, Homo sapiens [sequence omitted]

SEQ ID NO: 1199 - protein, 6 aa, Cricetulus griseus
FVLDCK

SEQ ID NO: 1200 - protein, 8 aa, Cricetulus griseus
GEKPNPLR

SEQ ID NO: 1201 - protein, 7 aa, Cricetulus griseus
WMSQHNR

SEQ ID NO: 1202 - protein, 9 aa, Cricetulus griseus
IIVLGLLPR

SEQ ID NO: 1203 - protein, 10 aa, Cricetulus griseus
NGELENIKPK

SEQ ID NO: 1204 - protein, 229 aa, Homo sapiens
MSQGDSNPAAIPHAAEDIQGDDRWMSQHNRFVLDCKDKEPDVLFVGDSMVQLMQQYEIWRELFSPLHALNFGIGGDTTRHVLWRLKNGELENIKPKVIVVWVGTNNHENTAEEVAGGIEAIVQLINTRQPQAKIIVLGLLPRGEKPNPLRQKNAKVNQLLKVSLPKLANVQLLDTDGGFVHSDGAISCHDMFDFLHLTGGGYAKICKPLHELIMQLLEETPEEKQTTIA

SEQ ID NO: 1205 - protein, 7 aa, Cricetulus griseus
LAEQAER

SEQ ID NO: 1206 - protein, 7 aa, Cricetulus griseus
MKGDYYR

SEQ ID NO: 1207 - protein, 9 aa, Cricetulus griseus
EMQPTHPIR

SEQ ID NO: 1208 - protein, 10 aa, Cricetulus griseus
DSTLIMQLLR

SEQ ID NO: 1209 - protein, 10 aa, Cricetulus griseus
KEMQPTHPIR

SEQ ID NO: 1210 - protein, 12 aa, Cricetulus griseus
YLAEVAAGDDKK

SEQ ID NO: 1211 - protein, 12 aa, Cricetulus griseus
FLIPNASQAESK

SEQ ID NO: 1212 - protein, 14 aa, Cricetulus griseus
SVTEQGAELSNEER

SEQ ID NO: 1213 - protein, 18 aa, Cricetulus griseus
GIVDQSQQAYQEAFEISK

SEQ ID NO: 1214 - protein, 19 aa, Cricetulus griseus
TAFDEAIAELDTLSESSYK

SEQ ID NO: 1215 - protein, 245 aa, Homo sapiens [sequence omitted]

SEQ ID NO: 1216 - protein, 6 aa, Cricetulus griseus
WFEQTK

SEQ ID NO: 1217 - protein, 10 aa, Cricetulus griseus
IAVAAQNCYK

SEQ ID NO: 1218 - protein, 12 aa, Cricetulus griseus
SNVSDAVAQSTR

SEQ ID NO: 1219 - protein, 13 aa, Cricetulus griseus
IIYGGSVTGATCK

SEQ ID NO: 1220 - protein, 13 aa, Cricetulus griseus
TATPQQAQEVHEK

SEQ ID NO: 1221 - protein, 249 aa, Homo sapiens
MAPSRKFFVGGNWKMNGRKQSLGELIGTLNAAKVPADTEVVCAPPTAYIDFARQKLDPKIAVAAQNCYKVTNGAFTGEISPGMIKDCGATWVVLGHSERRHVFGESDELIGQKVAHALAEGLGVIACIGEKLDEREAGITEKVVFEQTKVIADNAKDWSKVVLAYEPVWAIGTGKTATPQQAQEVHEKLRGWLKSNVSDAVAQSTRIIYGGSVTGATCKELASQPDVDGFLVGGASLKPEFVDIINAKQ

SEQ ID NO: 1222 - protein, 7 aa, Cricetulus griseus
NGFVVLK

SEQ ID NO: 1223 - protein, 12 aa, Cricetulus griseus
VHLVGIDIFTGK

SEQ ID NO: 1224 - protein, 12 aa, Cricetulus griseus
EDLRLPEGDLGK

SEQ ID NO: 1225 - protein, 8 aa, Cricetulus griseus
LPEGDLGK

SEQ ID NO: 1226 - protein, 154 aa, Oryctolagus cuniculus
MADDLDFETGDAGASATFPMQCSALRKNGFVVLKGRPCKIVEMSTSKTGKHGHAKVHLVGIDIFTGKKYEDICPSTHNMDVPNIKRNDFQLIGIQDGYLSLLQDSGEVREDLRLPEGDLGKEIEQKYDSGEEILITVLSAMTEEAAVAIKAMAK

SEQ ID NO: 1227 - protein, 7 aa, Cricetulus griseus
KIDFLTK

SEQ ID NO: 1228 - protein, 10 aa, Cricetulus griseus
TAEDAKDFFK

SEQ ID NO: 1229 - protein, 15 aa, Cricetulus griseus
ELLVPLTSSMYVPGK

SEQ ID NO: 1230 - protein, 194 aa, Mus musculus
MVSSTCRMPNSAVQSLLSTLTQISPLGPTFGWKILVLLPNMAQSINITELNLPQLEMLKNQLDQEVEFLSTSIAQLKVVQTKYVEAKDCLNVLNKSNEGKELLVPLTSSMYVPGKLHDVEHVLIDVGTGYYVEKTAEDAKDFFKRKIDFLTKQMEKIQPALQEKHAMKQAVMEMMSQKIQQLTALGAAQATVKA

SEQ ID NO: 1231 - protein, 6 aa, Cricetulus griseus
HVEEVR

SEQ ID NO: 1232 - protein, 7 aa, Cricetulus griseus
HVEEVRK

SEQ ID NO: 1233 - protein, 8 aa, Cricetulus griseus
KLEAAEER

SEQ ID NO: 1234 - protein, 8 aa, Cricetulus griseus
LEAAEERR

SEQ ID NO: 1235 - protein, 8 aa, Cricetulus griseus
MEANKENR

SEQ ID NO: 1236 - protein, 9 aa, Cricetulus griseus
EHEKEVLQK

SEQ ID NO: 1237 - protein, 10 aa, Cricetulus griseus
AIEENNNFSK

SEQ ID NO: 1238 - protein, 12 aa, Cricetulus griseus
ESVPDFPLSPPK

SEQ ID NO: 1239 - protein, 149 aa, Mus musculus; identical to SEQ ID NO: 506

SEQ ID NO: 1240 - protein, 9 aa, Cricetulus griseus
GADINAPDK

SEQ ID NO: 1241 - protein, 13 aa, Cricetulus griseus
NGDLDEVKDYVAK

SEQ ID NO: 1242 - protein, 118 aa, Gallus gallus
MSDKEFMWALKNGDLDEVKDYVAKGEDVNRTLEGGRKPLHYAADCGQLEILEFLLLKGADINAPDKHNITPLLSAVYEGHVSCVKLLLSKGADKTVKGPDGLTAFEATDNQAIKTLLQ

SEQ ID NO: 1243 - protein, 6 aa, Cricetulus griseus
LLTSLR

SEQ ID NO: 1244 - protein, 7 aa, Cricetulus griseus
ANVTAIR

SEQ ID NO: 1245 - protein, 6 aa, Cricetulus griseus
YIKNPR

SEQ ID NO: 1246 - protein, 7 aa, Cricetulus griseus
TIADIIR

SEQ ID NO: 1247 - protein, 7 aa, Cricetulus griseus
ACTILLR

SEQ ID NO: 1248 - protein, 8 aa, Cricetulus griseus
ANVTAIRR

SEQ ID NO: 1249 - protein, 8 aa, Cricetulus griseus
EILSEVER

SEQ ID NO: 1250 - protein, 9 aa, Cricetulus griseus
TVQFEENGR

SEQ ID NO: 1251 - protein, 9 aa, Cricetulus griseus
IVSRPEELR

SEQ ID NO: 1252 - protein, 10 aa, Cricetulus griseus
ISTPVDVNNR

SEQ ID NO: 1253 - protein, 11 aa, Cricetulus griseus
AVAQALEVIPR

SEQ ID NO: 1254 - protein, 11 aa, Cricetulus griseus
TAVETAVLLLR

SEQ ID NO: 1255 - protein, 10 aa, Cricetulus griseus
NLQDAMQVCR

SEQ ID NO: 1256 - protein, 10 aa, Cricetulus griseus
NLQDAMQVCR

SEQ ID NO: 1257 - protein, 12 aa, Cricetulus griseus
TLIQNDGASTIR

SEQ ID NO: 1258 - protein, 11 aa, Cricetulus griseus
AMTGVEQWPYR

SEQ ID NO: 1259 - protein, 11 aa, Cricetulus griseus
AMTGVEQWPYR

SEQ ID NO: 1260 - protein, 12 aa, Cricetulus griseus
KGESQTDIEITR

SEQ ID NO: 1261 - protein, 12 aa, Cricetulus griseus
GISDLAQHYLMR

SEQ ID NO: 1262 - protein, 12 aa, Cricetulus griseus
GISDLAQHYLMR

SEQ ID NO: 1263 - protein, 13 aa, Cricetulus griseus
IPGGIIEDSCVLR

SEQ ID NO: 1264 - protein, 17 aa, Cricetulus griseus
VEKIPGGIIIEDSCVLR

SEQ ID NO: 1265 - protein, 545 aa, Rattus norvegicus; identical to SEQ ID NO: 117

SEQ ID NO: 1266 - protein, 7 aa, Cricetulus griseus
FADGSIR

SEQ ID NO: 1267 - protein, 8 aa, Cricetulus griseus
AFGGQSLK

SEQ ID NO: 1268 - protein, 7 aa, Cricetulus griseus
CDCVADR

SEQ ID NO: 1269 - protein, 8 aa, Cricetulus griseus
WHFYDTVK

SEQ ID NO: 1270 - protein, 11 aa, Cricetulus griseus
NTVIATGGYGR

SEQ ID NO: 1271 - protein, 10 aa, Cricetulus griseus
SMQNHAAVFR

SEQ ID NO: 1272 - protein, 10 aa, Cricetulus griseus
SMQNHAAVFR

SEQ ID NO: 1273 - protein, 11 aa, Cricetulus griseus
VGSVLQEGCEK

SEQ ID NO: 1274 - protein, 13 aa, Cricetulus griseus
GEGGILINSQGER

SEQ ID NO: 1275 - protein, 11 aa, Cricetulus griseus
VTLEYRPVIDK

SEQ ID NO: 1276 - protein, 14 aa, Cricetulus griseus
GVIALCIEDGSIHR

SEQ ID NO: 1277 - protein, 15 aa, Cricetulus griseus
ACALSIAESCRPGDK

SEQ ID NO: 1278 - protein, 15 aa, Cricetulus griseus
VDEYDYSKPIQGQQK

SEQ ID NO: 1279 - protein, 17 aa, Cricetulus griseus
VRVDEYDYSKPIQGQQK

SEQ ID NO: 1280 - protein, 20 aa, Cricetulus griseus
TYFSCTSAHTSTGDGTAMVT

SEQ ID NO: 1281 - protein, 20 aa, Cricetulus griseus
TYFSCTSAHTSTGDGTAMVT

SEQ ID NO: 1282 - protein, 661 aa, Mus musculus
VGAVSRLLRGRRLALTGAWPGTLQKQTCGFHFSVGENKKASAKVSDAISTQYPVVDHEFDAVVVGAGGAGLRAAFGLSEAGFNTACLTKLFPTRSHTVAAQGGINAALGNMEEDNWRWHFYDTVKGSDWLGDQDAIHYMTEQAPASVVELENYGMPFSRTEDGKIYQRAFGGQSLKFGKGGQAHRCCCVADRTGHSLLHTLYGRSLRYDTSYFVEYFALDLLMENGECRGVIALCIEDGSIHRIRAKNTVIATGGYGRTYFSCTSAHTSTGDGTAMVTRAGLPCQDLEFVQFHPTGIYGAGCLITEGCRGEGGILINSQGERFMERYAPVAKDLASRDVVSRSMTLEIREGRGCGPEKDHVYLQLHHLPPEQLATRLPGISETAMIFAGVDVTKEPIPVLPTVHYNMGGIPTNYKGQVLKHVNGQDQIVPGLYACGEAACASVHGANRLGANSLLDLVVFGRACALSIAESCRPGDKVPSIKANAGEESVMNLDKLRFADGSIRTSELRLNMQKSMQNHAAVFRVGSVLQEGCEKISQLYGDLKHLKTFDRGMVWNTDLVETLELQNLMLCALQTIYGAEARKESRGAHAREDYKVRVDEYDYSKPIQGQQKKPFGEHWRKHTLSYVDIKTGKVTLEYRPVIDKTLNEADCATVPPAIRSY

SEQ ID NO: 1283 - protein, 6 aa, Cricetulus griseus
CYSVYR

SEQ ID NO: 1284 - protein, 9 aa, Cricetulus griseus
YTIGLGQAR

SEQ ID NO: 1285 - protein, 9 aa, Cricetulus griseus
ASSELFNQK

SEQ ID NO: 1286 - protein, 13 aa, Cricetulus griseus
TCVAPDVFAENMK

SEQ ID NO: 1287 - protein, 13 aa, Cricetulus griseus
TCVAPDVFAENMK

SEQ ID NO: 1288 - protein, 12 aa, Cricetulus griseus
LEDTYFDRDVEK

SEQ ID NO: 1289 - protein, 11 aa, Cricetulus griseus
MFNDFLNDQNR

SEQ ID NO: 1290 - protein, 17 aa, Cricetulus griseus
YDGVDAGKYTIGLGQAR

SEQ ID NO: 1291 - protein, 520 aa, Mus musculus; identical to SEQ ID NO: 833

SEQ ID NO: 1292 - protein, 11 aa, Cricetulus griseus
IGLFGGAGVGK

SEQ ID NO: 1293 - protein, 10 aa, Cricetulus griseus
IPVGPETLGR

SEQ ID NO: 1294 - protein, 9 aa, Cricetulus griseus
VDLLAPYAK

SEQ ID NO: 1295 - protein, 12 aa, Cricetulus griseus
TIAMDGTEGLVR

SEQ ID NO: 1296 - protein, 12 aa, Cricetulus griseus
TIAMDGTEGLVR

SEQ ID NO: 1297 - protein, 12 aa, Cricetulus griseus
IMNVIGEPIDER

SEQ ID NO: 1298 - protein, 14 aa, Cricetulus griseus
AHGGYSVFAGVGER

SEQ ID NO: 1299 - protein, 14 aa, Cricetulus griseus
FTQAGSEVSALLGR

SEQ ID NO: 1300 - protein, 15 aa, Cricetulus griseus
VALVYGQMNEPPGAR

SEQ ID NO: 1301 - protein, 15 aa, Cricetulus griseus
VALVYGQMNEPPGAR

SEQ ID NO: 1302 - protein, 16 aa, Cricetulus griseus
IMDPNIVGNEHYDVAR

SEQ ID NO: 1303 - protein, 533 aa, Mus musculus
HASAMLSLVGRVASASASGALRGLSPSAALPQAQLLLRAAPAGVHPARDYAAQASAAPKAGTATGRIVAVIGAVVDVQFDEGLPPILNALEVQGRDSRLVLEVAQHLGESTVRTIAMDGTEGLVRGQKVLDSGAPIKIPVGPETLGRIMNVIGEPIDERGPIKTKQFAPIHAEAPEFIEMSVEQEILVTGIKVVDLLAPYAKGGKIGLFGGAGVGKTVLIMELINNVAKAHGGYSVFAGVGERTREGNDLYHEMIESGVINLKDATSKVALVYGQMNEPPGARARVALTGLTVAEYFRDQEGQDVLLFIDNIFRFTQAGSEVSALLGRIPSAVGYQPTLATDMGTMQERITTTKKGSITSVQAIYVPADDLTDPAPATTFAHLDATTVLSRAIAELGIYPAVDPLDSTSRIMDPNIVGNEHYDVARGVQKILQDYKSLQDIIAILGMDELSEEDKLTVSRARKIQRFLSQPFQVAEVFTGHMGKLVPLKETIKGFQQILAGEYDHLPEQAFYMVGPIEEAVAKADKLAEEHGS

SEQ ID NO: 1304 - protein, 7 aa, Cricetulus griseus
LADLIER

SEQ ID NO: 1305 - protein, 8 aa, Cricetulus griseus
TIEEVVGR

SEQ ID NO: 1306 - protein, 9 aa, Cricetulus griseus
RVTLELGGK

SEQ ID NO: 1307 - protein, 9 aa, Cricetulus griseus
VVGNPFDSR

SEQ ID NO: 1308 - protein, 10 aa, Cricetulus griseus
YGLAAAVFTK

SEQ ID NO: 1309 - protein, 11 aa, Cricetulus griseus
LLCGGGAAADR

SEQ ID NO: 1310 - protein, 10 aa, Cricetulus griseus
AAFQLGSPWR

SEQ ID NO: 1311 - protein, 14 aa, Cricetulus griseus
LGPALATGNVVVHK

SEQ ID NO: 1312 - protein, 12 aa, Cricetulus griseus
EEIFGPVMQILK

SEQ ID NO: 1313 - protein, 13 aa, Cricetulus griseus
GYFIQPTVFGDVK

SEQ ID NO: 1314 - protein, 13 aa, Cricetulus griseus
TEQGPQVDETQFK

SEQ ID NO: 1315 - protein, 13 aa, Cricetulus griseus
TIPIDGDFFSYTR

SEQ ID NO: 1316 - protein, 14 aa, Cricetulus griseus
ELGEYGLQAYTEVK

SEQ ID NO: 1317 - protein, 14 aa, Cricetulus griseus
TFVQEDVYDEFVER

SEQ ID NO: 1318 - protein, 21 aa, Cricetulus griseus
TFPTVNPSTGEVICQVAEGSK

SEQ ID NO: 1319 - protein, 500 aa, Mesocricetus auratus; identical to SEQ ID NO: 1069

SEQ ID NO: 1320 - protein, 8 aa, Cricetulus griseus
LAPVLSIK

SEQ ID NO: 1321 - protein, 6 aa, Cricetulus griseus
IYNYYK

SEQ ID NO: 1322 - protein, 8 aa, Cricetulus griseus
KFAADAIK

SEQ ID NO: 1323 - protein, 7 aa, Cricetulus griseus
RLIELYK

SEQ ID NO: 1324 - protein, 9 aa, Cricetulus griseus
TIVMGASFR

SEQ ID NO: 1325 - protein, 9 aa, Cricetulus griseus
TIVMGASFR

SEQ ID NO: 1326 - protein, 10 aa, Cricetulus griseus
LGGPQEEQIK

SEQ ID NO: 1327 - protein, 11 aa, Cricetulus griseus
SYEPQEDPGVK

SEQ ID NO: 1328 - protein, 11 aa, Cricetulus griseus
LSFDKDAMVAR

SEQ ID NO: 1329 - protein, 11 aa, Cricetulus griseus
LSFDKDAMVAR

SEQ ID NO: 1330 - protein, 12 aa, Cricetulus griseus
LSSTWEGIQAGK

SEQ ID NO: 1331 - protein, 13 aa, Cricetulus griseus
ALAGCDFLTISPK

SEQ ID NO: 1332 - protein, 12 aa, Cricetulus griseus
ILDWHVANTDKK

SEQ ID NO: 1333 - protein, 337 aa, Cricetulus griseus; identical to SEQ ID NO: 875

SEQ ID NO: 1334 - protein, 7 aa, Cricetulus griseus
NQQIFLR

SEQ ID NO: 1335 - protein, 8 aa, Cricetulus griseus
HDGAFLIR

SEQ ID NO: 1336 - protein, 7 aa, Cricetulus griseus
YFLWVVK

SEQ ID NO: 1337 - protein, 8 aa, Cricetulus griseus
NYVTPVNR

SEQ ID NO: 1338 - protein, 9 aa, Cricetulus griseus
FGNDVQHFK

SEQ ID NO: 1339 - protein, 9 aa, Cricetulus griseus
AEEMLSKQR

SEQ ID NO: 1340 - protein, 10 aa, Cricetulus griseus
QRHDGAFLIR

SEQ ID NO: 1341 - protein, 11 aa, Cricetulus griseus
ATADDELSFKR

SEQ ID NO: 1342 - protein, 12 aa, Cricetulus griseus
GACHGQTGMFPR

SEQ ID NO: 1343 - protein, 12 aa, Cricetulus griseus
GACHGQTGMFPR

SEQ ID NO: 1344 - protein, 14 aa, Cricetulus griseus
ESESAPGDFSLSVK

SEQ ID NO: 1345 - protein, 12 aa, Cricetulus griseus
FNSLNELVDYHR

SEQ ID NO: 1346 - protein, 12 aa, Cricetulus griseus
VLNEECDQNWYK

SEQ ID NO: 1347 - protein, 14 aa, Cricetulus griseus
NYIEMKPHPWFFGK

SEQ ID NO: 1348 - protein, 217 aa, Homo sapiens
MEAIAKYDFKATADDELSFKRGDILKVLNEECDQNWYKAELNGKDGFIPKNYIEMKPHPWFFGKIPRAKAEEMLSKQRHDGAFLIRESESAPGDFSLSVKFGNDVQHFKVLRDGAGKYFLWVVKFNSLNELVDYHRSTSVSRNQQIFLRDIEQVPQQPTYVQALFDFDPQEDGELGFRRGDFIHVMDNSGPNWWKGACHGQTGMFPRNYVTPVNRNV

SEQ ID NO: 1349 - protein, 7 aa, Cricetulus griseus
YIKDYMK

SEQ ID NO: 1350 - protein, 8 aa, Cricetulus griseus
IEEQKPER

SEQ ID NO: 1351 - protein, 10 aa, Cricetulus griseus
GKIEEQKPER

SEQ ID NO: 1352 - protein, 13 aa, Cricetulus griseus
VKPFMTGAAEQIK

SEQ ID NO: 1353 - protein, 13 aa, Cricetulus griseus
VKPFMTGAAEQIK

SEQ ID NO: 1354 - protein, 165 aa, Rattus norvegicus; identical to SEQ ID NO: 334

SEQ ID NO: 1355 - protein, 9 aa, Cricetulus griseus
LTEAKPVDK

SEQ ID NO: 1356 - protein, 10 aa, Cricetulus griseus
LVESLPQEIK

SEQ ID NO: 1357 - protein, 11 aa, Cricetulus griseus
KLVESLPQEIK

SEQ ID NO: 1358 - protein, 12 aa, Cricetulus griseus
NYVQGINLVQAK

SEQ ID NO: 1359 - protein, 14 aa, Cricetulus griseus
SEALAGAPLDNAPK

SEQ ID NO: 1360 - protein, 203 aa, Cricetus cricetus
MLPAAAAAASLWAPRLGLRGARLRLARQQVPGVCAARQLSSSSQRRSEALAGAPLDNAPKEYPPKIQQLVQDIASLTLLEISDLNELLKKTLKIQDVGLMPMGGMMPGAVPAAAAAAPEVAEGEDILKQKERTHFTVRLTEAKPVDKVKLIKEIKNYVQGINLVQAKKLVESLPQEIKANVAKAEAEKIKAALEAVGGTVVLE

SEQ ID NO: 1361 - protein, 6 aa, Cricetulus griseus
EKHNIR

SEQ ID NO: 1362 - protein, 6 aa, Cricetulus griseus
ELNEFR

SEQ ID NO: 1363 - protein, 9 aa, Cricetulus griseus
MVGGVLVER

SEQ ID NO: 1364 - protein, 9 aa, Cricetulus griseus
MVGGVLVER

SEQ ID NO: 1365 - protein, 8 aa, Cricetulus griseus
GKELNEFR

SEQ ID NO: 1366 - protein, 8 aa, Cricetulus griseus
ELNEFREK

SEQ ID NO: 1367 - protein, 11 aa, Cricetulus griseus
LMGEDEKPAAK

SEQ ID NO: 1368 - protein, 11 aa, Cricetulus griseus
LMGEDEKPAAK

SEQ ID NO: 1369 - protein, 14 aa, Cricetulus griseus
GAVSAEQVIAGFNR

SEQ ID NO: 1370 - protein, 15 aa, Cricetulus griseus
EVLPALEGNKEQIQK

SEQ ID NO: 1371 - protein, 154 aa, Mus musculus
MADSSGRVGKSGGTARWKGAVSAEQVIAGFNRLRQEQRGLASKAAELEMELNEHSLVIDTLKEVDETRKCYRMVGGVLVERTVKEVLPALEGNKEQIQKIIETLSQQLQAKGKELNEFREKHNIRLMGEDEKPAAKENSEGAGAKASSAGVLVS

SEQ ID NO: 1372 - protein, 7 aa, Cricetulus griseus
HVEEVRK

SEQ ID NO: 1373 - protein, 8 aa, Cricetulus griseus
SHEAEVLK

SEQ ID NO: 1374 - protein, 8 aa, Cricetulus griseus
KLEAAEER

SEQ ID NO: 1375 - protein, 8 aa, Cricetulus griseus
DKHVEEVR

SEQ ID NO: 1376 - protein, 9 aa, Cricetulus griseus
DLSLEEIQK

SEQ ID NO: 1377 - protein, 9 aa, Cricetulus griseus
EHEKEVLQK

SEQ ID NO: 1378 - protein, 10 aa, Cricetulus griseus
AIEENNNFSK

SEQ ID NO: 1379 - protein, 12 aa, Cricetulus griseus
ESVPDFPLSPPK

SEQ ID NO: 1380 - protein, 13 aa, Cricetulus griseus
ASGQAFELILSPR

SEQ ID NO: 1381 - protein, 14 aa, Cricetulus griseus
SKESVPDFPLSPPK

SEQ ID NO: 1382 - protein, 149 aa, Mus musculus; identical to SEQ ID NO: 506

SEQ ID NO: 1383 - protein, 10 aa, Cricetulus griseus
EGVHGGTLNK

SEQ ID NO: 1384 - protein, 9 aa, Cricetulus griseus
AYELALYLR

SEQ ID NO: 1385 - protein, 11 aa, Cricetulus griseus
EGVHGGTLNKK

SEQ ID NO: 1386 - protein, 14 aa, Cricetulus griseus
SQGGEPTYNVAVGR

SEQ ID NO: 1387 - protein, 13 aa, Cricetulus griseus
DREGFFTNGLGAK

SEQ ID NO: 1388 - protein, 14 aa, Cricetulus griseus
DSLYVDGDCTMDIR

SEQ ID NO: 1389 - protein, 14 aa, Cricetulus griseus
DSLYVDGDCTMDIR

SEQ ID NO: 1390 - protein, 146 aa, Mus musculus
MAGWQSYVDNLMCDGCCQEAAIVGYCDAKYVWAATGGGVFQSITPVEIDMIVGKDREGFFTNGLTLGAKKCSVIRDSLYVDGDCTMDIRTKSQGGEPTYNVAVGRAGRALVIVMGKEGVHAGTINKKTYELALYLKRSVTNLYLAS

SEQ ID NO: 1391 - protein, 7 aa, Cricetulus griseus
EGDIVKR

SEQ ID NO: 1392 - protein, 10 aa, Cricetulus griseus
VLSIGDGIAR

SEQ ID NO: 1393 - protein, 13 aa, Cricetulus griseus
TGTAEVSSILEER

SEQ ID NO: 1394 - protein, 15 aa, Cricetulus griseus
ILGADTSVDLEETGR

SEQ ID NO: 1395 - protein, 16 aa, Cricetulus griseus
TGAIVDVPVGEELLGR

SEQ ID NO: 1396 - protein, 121 aa, Canis familiaris
MLSVRVAAAVARALPRRAGLVSKNALGSSFIAARNLHASNTCLQKTGTAEVSSILEERILGADTSVDLEETGRVLSIGDGIARVHGLRNVQAEEMVEFSSGLKGMSLNLEPDNVGVVVCPW

SEQ ID NO: 1397 - protein, 11 aa, Cricetulus griseus
SLDVNQDSELK

SEQ ID NO: 1398 - protein, 6 aa, Cricetulus griseus
FNEYWR

SEQ ID NO: 1399 - protein, 98 aa, Homo sapiens
MAAEPLTELEESIETVVTTFFTFARQEGRKDSLSVNEFKELVTQQLPHLLKDVGSLDEKMKSLDVNQDSELKFNEYWRLIGELAKEIRKKKDLKIRKK

SEQ ID NO: 1400 - protein, 7 aa, Cricetulus griseus
DPLAVDK

SEQ ID NO: 1401 - protein, 10 aa, Cricetulus griseus
EFPGFLENQK

SEQ ID NO: 1402 - protein, 97 aa, Macaca mulatta
MPSQMEHAMETMMFTFHKFAGDKGYLTKEDLRVLMEKEFPGFLENQKDPLAVDKIMKDLDQCRDGKVGFQSFFSLIAGLTIACNDYFVVHMKQKGKK

SEQ ID NO: 1403 - protein, 8 aa, Cricetulus griseus
AQDPDQLR

SEQ ID NO: 1404 - protein, 6 aa, Cricetulus griseus
DPFGSR

SEQ ID NO: 1405 - protein, 8 aa, Cricetulus griseus
AQDPDQLR

SEQ ID NO: 1406 - protein, 7 aa, Cricetulus griseus
LFVQDEK

SEQ ID NO: 1407 - protein, 9 aa, Cricetulus griseus
GDYAPILQK

SEQ ID NO: 1408 - protein, 18 aa, Cricetulus griseus
LASVLNTDPALDSELTSK

SEQ ID NO: 1409 - protein, 14 aa, Cricetulus griseus
LTFLEEEDKDLYIR

SEQ ID NO: 1410 - protein, 738 aa, Mus musculus
MADTQYILPNDIGVSSLDCREAFRLLSPTERLYAHHLSRAAWYGGLAVLLQTSPEAPYIYALLSRLFRAQDPDQLRQHALAEGLTEEEYQAFLVYAAGVYSNMGNYKSFGDTKFVPNLPKDKLGRVILGSKAAQQRPEEVRDLWQTCGDLMFSLEPRLRHLGLGKEGVTTYFSGDCTMEDAKLAQDFLDSQNLSAYNTRLFKVVGQEGKSHYEVRLASVLNTDPALDSELTSKLKRYEFQGNHFQVTRGDYAPILQKVVEHLEKAKAYAANSHQEQMLAQYVESFTQGSIEAHKRGSRFWIQDKGPIVESYIGFIESYRDPFGSRGEFEGFVAMVNKAMSAKFERLVVSAEQLLKELPWPPAFEKDKFLTPDFTSLDVLTFAGSGIPAGINIPNYDDLRQTEGFKNVSLGNVLAVAYAAKREKLTFLEEEDKDLYIRWKGPSFDVQVGLHELLGHGSGKLFVQDEKGAFNFDKETVINPETGEQIQSWYRSGETWDSKFSTIASSYEECRAESVGLYLCLNPQVLEIFGFEGADAEDVIYVNWLNMVRAGLLALEFYTPEAANWRQAHMQARFVILRVLLEAGEGLVTVTPTTGSDGRPDARVRLDRSKIRSVGRPALERFLRRLQVLKSTGDVVAGRALYEGYAAVTDAPPECFLTLRDTVLLRKESRKLIVQPNTRLEGSEVQLVEYEASAAGLIRSFCERFPEDGPELEEVLIQLAAADARFWRDQAQEAPPGQA

SEQ ID NO: 1411 - protein, 7 aa, Cricetulus griseus
EGIVALR

SEQ ID NO: 1412 - protein, 6 aa, Cricetulus griseus
FTFIEK

SEQ ID NO: 1413 - protein, 7 aa, Cricetulus griseus
GLQDVLR

SEQ ID NO: 1414 - protein, 6 aa, Cricetulus griseus
KFIEDR

SEQ ID NO: 1415 - protein, 9 aa, Cricetulus griseus
GLVLDHGAR

SEQ ID NO: 1416 - protein, 10 aa, Cricetulus griseus
TEVNSGFFYK

SEQ ID NO: 1417 - protein, 13 aa, Cricetulus griseus
AQAALAVNISAAR

SEQ ID NO: 1418 - protein, 13 aa, Cricetulus griseus
QADLYISEGLHPR

SEQ ID NO: 1419 - protein, 16 aa, Cricetulus griseus
VLAQNSGFDLQETLVK

SEQ ID NO: 1420 - protein, 21 aa, Cricetulus griseus
DGNVLLHEMQIQHPTASLIAK

SEQ ID NO: 1421 - protein, 531 aa, Rattus norvegicus
MAAVKTLNPKAEVARAQAALAVNISAARGLQDVLRTNLGPKGTMKMLVSGAGDIKLTKDGNVLLHEMQIQHPTASLIAKVATAQDDITGDGTTSNVLIIGELLKQADLYISEGLHPRIITEGFEAAKEKALQFLEQVKVSKEMDRETLIDVARTSLRTKVHAELADVLTEAVVDSILAIRKKDEPIDLFMVEIMEMKHKSETDTSLIRGLVLDHGARHPDMKKRVENAYILTCNVSLEYEKTEVNSGFFYKSAEEREKLVKAERKFIEDRVKKIVELKKKVCGDSDKGFVVINQKGIDPFSLDALAKEGIVALRRAKRRNMERLTLACGGIALNSFDDLNPDCLGHAGLVYEYTLGEEKFTFIEKCNNPRSVTLLVKGPNKHTLTQIKDAIRDGLRAVKNAIDDGCVVPGAGAVEVALAEALIKYKPSVKGRAQLGVQAFADALLIIPKVLAQNSGFDLQETLVKVQAEHSESGQLVGVDLNTGEPMVAAEMGVWDNYCVKKQLLHSCTVIATNILLVDEIMRAGMSSLKG

SEQ ID NO: 1422 - protein, 7 aa, Cricetulus griseus
QTSMFPR

SEQ ID NO: 1423 - protein, 10 aa, Cricetulus griseus
IYVISLAEPR

SEQ ID NO: 1424 - protein, 10 aa, Cricetulus griseus
IHDPQLLTER

SEQ ID NO: 1425 - protein, 12 aa, Cricetulus griseus
VTMLFLGLHNVR

SEQ ID NO: 1426 - protein, 15 aa, Cricetulus griseus
FGAPPHAGGGIGLER

SEQ ID NO: 1427 - protein, 13 aa, Cricetulus griseus
NNAYLAQSPQLYK

SEQ ID NO: 1428 - protein, 15 aa, Cricetulus griseus
IGSCTQQDVELHVQK

SEQ ID NO: 1429 - protein, 500 aa, Homo sapiens
MPSATQRKSQEKPREIMDAAEDYAKERYGISSMIQSQEKPDRVLVRVRDLTIQKADEVVWVRARVHTSRAKGKQCFLVLRQQQFNVQALVAVGDHASKQMVKFAANINKESIVDVEGVVRKVNQKIGSCTQQDVELHVQKIYVISLAEPRLPLQLDDAVRPEQEGEEEGRATVNQDTRLDNRVIDLRTSTSQAVFRLQSGICHLFRETLINKGFVEIQTPKIISAASEGGANVFTVSYFKNNAYLAQSPQLYKQMCICADFEKVFSIGPVFRAEDSNTHRHLTEFVGLDIEMAFNYHYHEVMEEIADTMVQIFKGLQERFQTEIQTVNKQFPCEPFKFLEPTLRLEYCEALAMLREAGVEMGDEDDLSTPNEKLLGHLVKEKYDTDFYILDKYPLAVRPFYTMPDPRNPKQSKSYDMFMRGEEILSGAQRIHDPQLLTERALHHGNDLEKIKAYIDSFRFGAPPHAGGGIGLERVTMLFLGLHNVRQTSMFPRDPKRLTP

SEQ ID NO: 1430 - protein, 9 aa, Cricetulus griseus
TAVCDIPPR

SEQ ID NO: 1431 - protein, 10 aa, Cricetulus griseus
LAVNMVPFPR

SEQ ID NO: 1432 - protein, 10 aa, Cricetulus griseus
FPGQLNADLR

SEQ ID NO: 1433 - protein, 445 aa, Gallus gallus
MREIVHIQAGQCGNQIGAKFWEVISDEHGIDPTGSYHGDSDLQLERINVYYNEAAGNKYVPRAILVDLEPGTMDSVRSGPFGQIFRPDNFVFGQSGAGNNWAKGHYTEGAELVDSVLDVVRKESESCDCLQGFQLTHSLGGGTGSGMGTLLISKIREEYPDRIMNTFSVMPSPKVSDTVVEPYNATVSVHQLVENTDETYCIDNEALYDICFRTLKLTTPTYGDLNHLVSATMSGVTTCLRFPGQLNADLRKLAVNMVPFPRLHFFMPGFAPLTSRGSQQYRALTVPELTQQMFDSKNMMAACDPRHGRYLTVAAIFRGRMSMKEVDEQMLNVQNKNSSYFVEWIPNNVKTAVCDIPPRGLKMSATFIGNSTAIQELFKRISEQFTAMFRRKAFLHWYTGEGMDEMEFTEAESNMNDLVSEYQQYQDATADEQGEFEEEGEEDEA

SEQ ID NO: 1434 - protein, 7 aa, Cricetulus griseus
FADYIDK

SEQ ID NO: 1435 - protein, 14 aa, Cricetulus griseus
SLYSSSPGGAYVTR

SEQ ID NO: 1436 - protein, 448 aa, Cricetulus griseus
PRHLEPAGSNRSYVTTSTRTYSLGALRPSTSRSLYSSSPGGAYVTRSSAVRLRSSMPGVRLLQDSVDFSLADAINTEFKNTRTNEKVELQELNDRFADYIDKVRFLEQQNKILLAELEQLKGQGKSRLGDLYEEEMRELRRQVDQLTNDKARVEVERDNLAEDIIRLREKLQEEMLQREEAESTLQSFRQDVDNASLARLDLERKVESLQEEIAFLKKLHDEEIQELQAQIQEQHVQIDVDVSKPDLTAALRDVRQQYESVAAKNLQEAEEWYKSKFADLSEAANRNNDALRQAKQESNEYRRQVQSLTCEVDALKGTNESLERQMREMEENFALEAANYQDTIGRLQDEIQNMKEEMARHLREYQDLLNVKMALDIEIATYRKLLEGEESRISLPLPNFSSLNLRETNLESLPLVDTHSKRTLLIKTVETRDGQVINETSQHHDDLE

SEQ ID NO: 1437 - protein, 11 aa, Cricetulus griseus
VTADVINAAEK

SEQ ID NO: 1438 - protein, 15 aa, Cricetulus griseus
AGTGVDNVDLEAATR

SEQ ID NO: 1439 - protein, 12 aa, Cricetulus griseus
ILQDGGLQVVEK

SEQ ID NO: 1440 - protein, 11 aa, Cricetulus griseus
GGIVDEGALLR

SEQ ID NO: 1441 - protein, 9 aa, Cricetulus griseus
TLGILGLGR

SEQ ID NO: 1442 - protein, 533 aa, Macaca fascicularis
MAFANLRKVLISDSLDPCCRKILQDGGLQVVEKQNLSKEELIAELQDCEGLIVRSATKVTADVINAAEKLQVVGRAGTGVDNVDLEAATRKGVLVMNTPNGNSLSAAELTCGMIMCLARQIPQATASMKDGKWERKKFMGTELNGKTLGILGLGRIGREVATRMQSFGMKTIGYDPIISPEVSASFGVQQLPLEEIWPLCDFITVHTPLLPSTTGLLNDNTFAQCKKGVRVVNCARGGIVDEGALLRALQSGQCAGAALDVFTEEPPRDRALVDHENVISCPHLGASTKEAQSRCGEEIAVQFVDMVKGKSLAGVVNAQALTSAFSPHTKPWIGLAEALGTLMRAWAGSPKGTIQVITQGTSLKNAGNCLSPAVIVGLLKEASKQADVNLVNAKLLVKEAGLDVTTSHSPAAPGEQGFGECLLAVALAGAPYQAVGLVQGTKPVLQGLNGAVFRPEVPLRRGLPLLLFRTQTSDPAMLPTMIGLLAEAGVRLLSYQTSLVSDGETWHVMGISSLLPSLEAWKPHVTEAFQFHF

SEQ ID NO: 1443 - protein, 12 aa, Cricetulus griseus
DVIELTDDTFDK

SEQ ID NO: 1444 - protein, 11 aa, Cricetulus griseus
GEAPVDYDGGR

SEQ ID NO: 1445 - protein, 15 aa, Cricetulus griseus
IFQKGEAPVDYDGGR

SEQ ID NO: 1446 - protein, 13 aa, Cricetulus griseus
KDVIELTDDTFDK

SEQ ID NO: 1447 - protein, 15 aa, Cricetulus griseus
LAAVDATVNQVLANR

SEQ ID NO: 1448 - protein, 14 aa, Cricetulus griseus
NLEPEWATAATEVK

SEQ ID NO: 1449 - protein, 25 aa, Cricetulus griseus
VGAVDADKHQSLGGQYGVQGFPTIK

SEQ ID NO: 1450 - protein, 9 aa, Cricetulus griseus
NSYLEILLK

SEQ ID NO: 1451 - protein, 439 aa, Mesocricetus auratus
MARLGFGLVSCTFFLAASGLYSSSDDVIELTPSNFNREVIQSNSLWLVEFYAPWCGHCQRLTPEWKKAATALKDVVKVGAVDADKHQSLGGQYGVQGFPTIKIFGANKNKPEDYQGGRTGEAIVDAALSALRQLVKDRLSGRSGGYSSGKQGRGDSSSKKDVIELTDDTFDKNVLDSDDVWMVEFYAPWCGHCKNLEPEWATAATEVKEQTKGKVKLAAVDATVNQVLANRYGIRGFPTIKIFQKGEAPVDYDGGRTRSDIVSRALDLFSDNAPPPELLEIINEDVAKKMCEEHQLCVVAVLPHILDTGAARNSYLEILLKLADKYKKKMWGWLWTEAGAQSELENALGIGGFGYPAMARINARKMKFALLKGSFSEQGINEFLRELSFGRASTAPVGGGSFPAITAREPWDGRDGELPVEDDIDLSDVELDDLEKDEL

SEQ ID NO: 1452 - protein, 9 aa, Cricetulus griseus
RYIYDNVAK

SEQ ID NO: 1453 - protein, 12 aa, Cricetulus griseus
ASDLDGDLTATR

SEQ ID NO: 1454 - protein, 13 aa, Cricetulus griseus
TFDQLSPDESKER

SEQ ID NO: 1455 - protein, 11 aa, Cricetulus griseus
TFDQLSPDESK

SEQ ID NO: 1456 - protein, 8 aa, Cricetulus griseus
YIYDNVAK

SEQ ID NO: 1457 - protein, 12 aa, Cricetulus griseus
ASDLDGDLTATR

SEQ ID NO: 1458 - protein, 15 aa, Cricetulus griseus
IDSDGDGLVTTEELK

SEQ ID NO: 1459 - protein, 325 aa, Mus musculus
MARGGRLGLALGLLLALVLALRAKPTVRKERVVRPDSELGERPPEDNQSFQYDHEAFLGKEDSKTFDQLSPDESKERLGKIVDRIDSDGDGLVTTEELKLWIKRVQKRYIYDNVAKVWKDYDRDKDEKISWEEYKQATYGYYLGNPAEFHDSSDHHTFKKMLPRDERRFKASDLDGDLTATREEFTAFLHPEEFEHMKEIVVLETLEDIDKNGDGFVDQDEYIADMFSHEDNGPEPDWVLSEREQFNDFRDLNKDGKLDKDEIRHWILPQDYDHAQAEARHLVYESDKNKDEMLTKEEILDNWNMFVGSQATNYGEDLTKNHDEL

SEQ ID NO: 1460 - protein, 15 aa, Cricetulus griseus
AQVEIITDGEEPAEM

SEQ ID NO: 1461 - protein, 12 aa, Cricetulus griseus
VSDATGQMNLTK

SEQ ID NO: 1462 - protein, 7 aa, Cricetulus griseus
DLALAIR

SEQ ID NO: 1463 - protein, 16 aa, Cricetulus griseus
EVQGNESDLFMSYFPR

SEQ ID NO: 1464 - protein, 13 aa, Cricetulus griseus
QAALQVADGFISR

SEQ ID NO: 1465 - protein, 14 aa, Cricetulus griseus
YSPNTQVEILPQGR

SEQ ID NO: 1466 - protein, 352 aa, Mus musculus
MYTPIPQSGSPFPASVQDPGLHIWRVEKLKPVPIARESHGIFFSGDSYLVLHNGPEEASHLHLWIGQQSSRDEQGACAVLAVHLNTLLGERPVQHREVQGNESDLFMSYFPRGLKYYREGGVESAFHKTTSGARGAAIRKLYQVKGKKNIRATERPLSWDSFNTGDCFILDLGQNIFAWCGGKSNILERNKARDLALAIRDSERQGKAQVEIITDGEEPAEMIQVLGPKPALKEGNPEEDITADQTRPNAQAAALYKVSDATGQMNLTKVADSSPFASELLIPDDCFVLDNGLCAQIYIWKGRKANEKERQAALQVADGFISRMRYSPNTQVEILPQGRESPIFKQFFKNWK

SEQ ID NO: 1467 - protein, 9 aa, Cricetulus griseus
VILGSPAHR

SEQ ID NO: 1468 - protein, 11 aa, Cricetulus griseus
AVPSPPPASPR

SEQ ID NO: 1469 - protein, 10 aa, Cricetulus griseus
EPLPTLPLGR

SEQ ID NO: 1470 - protein, 13 aa, Cricetulus griseus
VTAGISFAIPSDR

SEQ ID NO: 1471 - protein, 11 aa, Cricetulus griseus
SQYNFIADWEK

SEQ ID NO: 1472 - protein, 13 aa, Cricetulus griseus
TAPAVVYIEILDR

SEQ ID NO: 1473 - protein, 325 aa, Homo sapiens
AVPSPPPASPRSQYNFIADVVEKTAPAVVYIEILDRHPFLGREVPISNGSGFVVAADGLIVTNAHVVADRRRVRVRLLSGDTYEAVVTAVDPVADIATLRIQTKEPLPTLPLGRSADVRQGEFVVAMGSPFALQNTITSGIVSSAQRPARDLGLPQTNVEYIQTDAAIDFGNAGGPLVNLDGEVIGVNTMKVTAGISFAIPSDRLREFLHRGEKKNSSSGISGSQRRYIGVMMLTLSPSILAELQLREPSFPDVQHGVLIHKVILGSPAHRAGLRPGDVILAIGEQMVQNAEDVYEAVRTQSQLAVQIRRGRETLTLYVTPEVTE

SEQ ID NO: 1474 - protein, 9 aa, Cricetulus griseus
FSVEEIIQK

SEQ ID NO: 1475 - protein, 12 aa, Cricetulus griseus
NPDEEDNTFYQR

SEQ ID NO: 1476 - protein, 12 aa, Cricetulus griseus
VFKVQTVQQASK

SEQ ID NO: 1477 - protein, 223 aa, Rattus norvegicus
MEEIPPTHYAASRAASVAENCINYQQGTPNKVFKVQTVQQASKEDIPGRGHKYHLKFSVEEIIQKQVTVSCTAEVLYPRMGQGSAPEVNFTFEGEIGKNPDEEDNTFYQRLMSMKEPLQAQNIPDNFGNVSPQMKPVHHLAWVACGYVMWQNSTEDTWYKMAKIQTVKQVQRNDDFIELDYTVLLHDVASQEIIPWQMQVLWHPQYGTKVKHNSRLPKEAPAE

SEQ ID NO: 1478 - DNA, 579 bp, Cricetulus griseus
cacgcaccgtgctgtgtgggacttgtgggcagcctgccgacaaggctgccagtggctcaagagcccaggtgggcggatccatctcctctggctcttctgcctccagtgtcacagtcactcgaagctaccgcagtgtggggggcagtgggggtggcagcttcggggacagcctagtcacccgctcctacctcctgggcaactccagtccccggacccagagctcccagaactgcagcatcatgtaatctgggacctgccaagcaggggtggggccagaggccacctgctcccacctcacctcatgcccacctcctgctctgcacctaatgggagcaggcctgaagccaaagaaaaaatttatttcctgcctttgggttttttttcttcttcttctatttttttttctaagagaagttattttctacagtggttttatactgaaggaaaaacacaagcaaaaaaaaaagtctctatctaaatcctaagcccttcccatactttccctgtttctgccttaaaatcaatgggcttctttctccaaggagcccagggaaaggactgcttttataacggctagtt

SEQ ID NO: 1479 - DNA, 527 bp, Cricetulus griseus
gctacagtatccatggattacatcatcacgggctgcagtatccatggattacatcatcacgggttgcagtatccatggattacatcatcacgggctgcagtatctatggattacatcatcaccggctgcaggatccatgggttacatcatcacgggctgcagctcaccctgggcttccagaaacccacagcagaaaaacaaattcattcctcaagctgaaggatcaaggctgaaatgttgacctctcagtgtctgccaagcttaagtactaagccaagaagcgtgtcatgtataacaagagtctgcacctgcagtgggctggagaccatcaaaatgcagttgcctcctgcccactgaacctctgaggtgaagaacaaagaagacttataggtgtcttatgtccaggaaagaccatgatgaactcacagctgcttctccctcaaactccactccacacagctccttcaagccaggtgtggtggaacacctctttaatccccgcactatcatgcagaggcaggtggata

SEQ ID NO: 1480 - DNA, 455 bp, Cricetulus griseus
aagttgactacttgccattctttgatttaggatttaggaggtgagagaatcaagaaggcccttaagatgatctatctctaagaattgaggggcagtgggttttttttataaatttgttagtagctttcagcatcagggataacatggtgactgttctattttgcaaaaagtgctcgcatactttattctggaccaaaatgcacaaagttgaaagactgttagcccaagaactgtgcgctgtgtccttggtgcagcttacacacaaagtaatctagtcatcacccattcaccagggttcctagagccacactggcagtcaggaatgtctccacattgtttcagggcattttaaaggtcttcagattgtaggctagtcagtactcccaacacaaggaagaaaacctcaaaattaaccaatagtcatgcaacataatcacaagcacagttttaagaag

SEQ ID NO: 1481 - DNA, 556 bp, Cricetulus griseus
  misc_feature (5)..(24): n is a, c, g, or t
cagannnnnnnnnnnnnnnnnnnncatgacatgaacaaagttctggatctggaaatgaagggtgacatcgagaagtgcctcactgcccttgtgaaatgttccaccagcaccccagctttctttgctgagaaactttatgaagccatgaagggagctggaactcgccataaggcattgatcaggattatggtctcccgttctgaaatcgacatgaatgaaatcaaagcattttacctgaagaagtatggaatctctctttgccaagccatcctggatgaaaccaaaggagactatgaaaagatcttggtggctctgtgtgatggcaactagatgtccccgctgctcagaagcactgtgatgagagcatctcttagctgttgctttcctctatcacacaagcttaagtaagagggttgctttagcagataacaagctaattacccactttgaataatataacatatgaataagttttacatcatacctctgtacaatagagaaataattgttttattatgttttccccagattataaatccctataagcaagttactc

SEQ ID NO: 1482 - DNA, 531 bp, Cricetulus griseus
taaactactgattgaatgtcatggctaaggcaaagatgatgttcctgtaatgcaataaatacattgagataactgtatatttatttccagacaccagatggatattggttttcaaagttaactctttttccttattagttttaaaaagtatcaaccttgtatttcacaaattatagtaacacttttagttatcaaaatgatacaggtaatgcctcttggttttgtgtaatattccagtgatatatggttcaaagtaacagccattgcatatgttttacttatgtcagtacatattctccctaaaggaatatgcatagtctttgtttacatgaattcaaatacttgggggaattgcctacaaatgccttattactaacgtgtgcggccttctgtgtgttaatacttactcataaagacctgttctttccacctgctctaatgatttcgagtagtagtagatacactattttgaatagcagtaatctttgaaaggaaatctattttacagagctacttatgttctagctggct

SEQ ID NO: 1483 - DNA, 582 bp, Cricetulus griseus
  misc_feature (3)..(31): n is a, c, g, or t
  misc_feature (35)..(74): n is a, c, g, or t
  misc_feature (87)..(154): n is a, c, g, or t
  misc_feature (156)..(197): n is a, c, g, or t
  misc_feature (199)..(216): n is a, c, g, or t
  misc_feature (257)..(316): n is a, c, g, or t
  misc_feature (319)..(341): n is a, c, g, or t
  misc_feature (343)..(371): n is a, c, g, or t
  misc_feature (401)..(462): n is a, c, g, or t
cannnnnnnnnnnnnnnnnnnnnnnnnnnnntctnnnnnnnnnnnnnnnnnnnnnnnnnnnnnnnnnnnnnnnntatacattacacnnnnnnnnnnnnnnnnnnnnnnnnnnnnnnnnnnnnnnnnnnnnnnnnnnnnnnnnnnnnnnnnnnnntnnnnnnnnnnnnnnnnnnnnnnnnnnnnnnnnnnnnnnnnnnannnnnnnnnnnnnnnnnnacgaggagtttattacggttcatacactatagtagaacctnnnnnnnnnnnnnnnnnnnnnnnnnnnnnnnnnnnnnnnnnnnnnnnnnnnnnnnnnnnnctnnnnnnnnnnnnnnnnnnnnnnncnnnnnnnnnnnnnnnnnnnnnnnnnnnnncatctatcccttatataggtaccactctannnnnnnnnnnnnnnnnnnnnnnnnnnnnnnnnnnnnnnnnnnnnnnnnnnnnnnnnnnnnntccatttcatcctaccattcattatcgctgccctagcaatggtccatcttctattcctacatgaaaccgggtctaataacccatcacgcctagattctgacccagataaaactccatttc

SEQ ID NO: 1484 - DNA, 580 bp, Cricetulus griseus
attaatttgacactgtagcctatatttttataaaatccagtactttgtaaagtccgtcatttgtaaccttgagtggacttcaatttctttagaaccaatttttcttgtttggttctgatttattgttgcactccatgatggcaaatttcaaaagtgtacattctgagcaatttttcttttcttcatttgtgggaaaacaccatcatgtatggggtgtcaccttcatttactgcaaatgtaccttgggactattaacataaagtatctcataagtatgaaatatatggaaagatatttaagattgaaaaatgaatagcaggcatatgagccattgcttatatattgtttgtctcttccatgctagagtccttggcacagcaaggtcagaaatcacagcgattttcttttttacttcctaacactgagctcataaggtttgtccctcaccatgaaatggacatttttagcttttcttacttaaagtatgttgccatattctgtgctgcatagcccttttaaaacctgaacaggctttcctctttctgctcagctgcaactaatgcaaactcaaaagttggta

SEQ ID NO: 1485 - DNA, 527 bp, Cricetulus griseus
gtcgacccacgcgtccgcggacgcgtgggcgcgcacgaagatgcttcagacacagaaaatgccattgaggatgaagaggaggaggaggaagatgaagaggaagatgacttggaagttaaggaagaaaatggtgttttggtcttaaatgatgcaaactttgataactttgttgctgacaaagatacagtgctactggagttctatgcaccatggtgtggacattgcaagcagtttgctccagaatatgagaaaattgccagcactttgaaggataatgaccctcccattgctgttgctaagattgatgcaacctcagcatccatgctggccagtagatttgatgtgagtggttatcccaccatcaagatcctgaagaagggacaggctgttgactatgatggctccaggacccatgaagaaattgttgccaaagtcagagaagtttcccagcctgactggacacctccacctgaagtcacgcttctattgactaaagataactttgatgatgttgtgaataatgcaga

SEQ ID NO: 1486 - DNA, 583 bp, Cricetulus griseus
tgcaactctcctgtgtctcggcctgcacagctcaaccatgtccgggacatcctccaggagcctggggaaaggaagctcgcctccgggtccggttccagagggcctgatccgcgtctacagcatgaggttctgccccttcgctcagagggcactgatggtcctgaaggccaagggaatccgacatgaaatcgtcaatatcaacctgaaaaacaagcccgagtggttcctcaagaagaatcccactgggctggtaccagttctggaggacagtaagggtcgcttgatctccgaatctgtcatcatttgtgagtacctggatgaggcctaccctgacaagaagctgttcccagatgacccttatgagaaagctcggcagaagatgaccttagagtcattctccaaggtgccccctttggttacaaggtttattagggggaacaaggaagaccgctctgccctaaaggaagaattgaggaaagaattctacaagctggaggatgctttgactgattgtcagagcgaattccgtattggggatgctgtctctatgactgattatcttatgtggccttggtttcaacga

SEQ ID NO: 1487 - DNA, 552 bp, Cricetulus griseus
tcatgagcaaattggctggtgaatctgagagcaaccttcgtaaagcctttgaggaagctgaaaagaatgctcctgctataatcttcattgatgagcttgatgccattgcgcccaaaagagagaaaactcacggggaagtagagcgtcgtatcgtgtctcagttgttgacccttatggatggcctgaagcagagagcacatgtgatagttatggcagcaaccaatagacccaatagcattgacccggccctacggcgatttggtcgctttgacagagaggtagatattggaatccctgatgctacaggacgcttggaaattcttcagatccataccaagaacatgaaactggcagatgatgtggacttggaacaggtagccaatgagactcatggccatgtaggtgctgatttggcagccctgtgttcagaggctgctctgcaggccatccggaaaaaaatggaccttattgatcttgaggatgagaccattgatgcagaggtcatgaattccttggcagttactatggatgatttccggtgggccttgagtc

SEQ ID NO: 1488 - DNA, 650 bp, Cricetulus griseus
  misc_feature (1)..(20): n is a, c, g, or t
nnnnnnnnnnnnnnnnnnnntcacactgtgctgtattgctgctgaactaaatgcactttccccatatgtggggcactggcttcaaacaattcagttcagtaccattatttttcaatctcatgtttccttcgttagtaggtggtatagtacagttatgggaaaatggcgcattgcattgacacattggtagttccatggaagttatgtaggatgtgcatgtactatttgataatattttcttttgctttactgcctttacaaacagcaaaagtgtaaatttgtgccccttacatagtactcttatttttggtagtgttggtctaggtcacttacttattgaggagaccccacagagcaagtgcatcctagatatcaccctaaaacataccttccacatgatgaacaactattatatataattaaatattgctgcttatttttctgttggcctccccccagtttttgggcattttgttctaaacaactattttttacaattaaaagtgtaatatcaagataaaaatctggacttttgcttttcctggcactcaaactcaagactgggtttgaggagcaaatctgggttcataactgacaaatttgaaggagcacgtaagaaatggaaggcaggtaaagatttaaaccctaca

SEQ ID NO: 1489 - DNA, 371 bp, Cricetulus griseus
  misc_feature (81)..(81): n is a, c, g, or t
tctaattccattgctgagcatttagtatccttgccttaccgagttcaaaggggatgggaaagtaaagtgtctttttcttantgcattttcagttatggggatgtgaatatagacagagggctctgcaccaactaatggagacttgacttccgtggagaggtagctgtaatattgggtttcactagataaactacaacatttctttggtacagtttgtaaagtagttttgcacacattcaactcttgattggggtgaaaatcctttcagtcaagtaattagatacataggcaggcgtattcttacagcacatgagagaactgagactcaaacatgaaatggggcaaactagctgggaagttgcagagctaaa

SEQ ID NO: 1490 - DNA, 554 bp, Cricetulus griseus
  misc_feature (508)..(508): n is a, c, g, or t
agtgggctttcggatcatgtctggtggctccgcggattacaacagagaacatggcggcccagagggaatggaccccgatggtgtcatcgagagcaactggaatgaaattgttgataactttgatgatatgaatttaaaggagtctcttsttcgaggcatctatgcttacggttttgagaagccttcakctattcagcagagagctattattccttgtattaaagggtatgatgtgattgctcaagctcagtcaggtactggcaagacagscacatttgctatttccatsctgcaacagktggagattgagttcaaggagacccaagcactagtattggyccccaccakataactggctcaacagatccaaaaggtaattktggctcttggagattatatgggagcaactkgycrtgcttgcrttggaggaacaaatgtycsgaatgagatgcwgaagttgcasgctgaarctsctyatattgktgkgggyacaccwtgaasagtcgtntgatatgctaaacagaagatacctttctccaaatggatcaaaatgt

SEQ ID NO: 1491 - DNA, 362 bp, Cricetulus griseus
  misc_feature (308)..(308): n is a, c, g, or t
gaaaaaactggctgggcgaatgcaaggcggcgtatggaaccacakcattgtgtgcttccaaacacatsagggsccccttttccakcacakggggcakarggatgttcacgctctgattttstaacaggcatcttcatgcctacatcacaksacacacacaccctacacacacaggggaccakgacacgctgaagarggactasgcragcacaggktagggcaccagggactcctgtgttgagccatggsctggggcacacatgcagaaacataagacactgkgcctccaatagaggggatagatttanggcattgaagcaggggttcaggagaccctgggtgggaggaaaaaggggggtgtg

SEQ ID NO: 1492 - DNA, 475 bp, Cricetulus griseus
  misc_feature (26)..(43): n is a, c, g, or t
caattttggaggtagccctggttatnnnnnnnnnnnnnnnnnntatggtggtggaggacctggatatggcaaccagggtgggggctacggaggtggttatgacaactatggaggaggaaattatggaagtggaaatkrcartgattttggaaattataaccagcaaccttctaactatggcccaatgaagagtggaaactttggtggtagcaggaacatgggaggaccatatggtggaggaaactatggtcctggaggaagtggaggaagtgggggctatggtggaaggagccgatattgagcttcttcctatttaccatgggcttcactgtataaataggagaggatgagagcccagaggtaacagaacagcttcaggttatcgaaataacaatgttaaggaaactcttatctcagtcatgcataaatatgcagtgatatggcagaagacaccagagcagatgcagagagccat

SEQ ID NO: 1493 - DNA, 783 bp, Cricetulus griseus
  misc_feature (111)..(118): n is a, c, g, or t
  misc_feature (120)..(146): n is a, c, g, or t
  misc_feature (202)..(208): n is a, c, g, or t
  misc_feature (210)..(222): n is a, c, g, or t
  misc_feature (225)..(226): n is a, c, g, or t
  misc_feature (259)..(267): n is a, c, g, or t
  misc_feature (280)..(303): n is a, c, g, or t
  misc_feature (429)..(465): n is a, c, g, or t
  misc_feature (494)..(503): n is a, c, g, or t
  misc_feature (507)..(510): n is a, c, g, or t
  misc_feature (516)..(541): n is a, c, g, or t
gtcgacccacgcatcckstssycatmatwwacttcacaattttttcaggcccaatagtcactatgctcagctccagtttctttcttrtatgaatkggkttaraaataaacnnnnnnnntnnnnnnnnnnnnnnnnnnnnnnnnnnnaacccacsatccmkaraasvatsrrcraaatrctttatkwckvmccactcgtccgnnnnnnngnnnnnnnnnnnnnggnncctcaactataaacaaatrggkctatgracatnnnnnnnnncaactaataatgnnnnnnnnnnnnnnnnnnnnnnnngrctgbsaaycaaayyaggcctttctccattycacgcctgactycctgawskttccccggaattccactctagatgggaccacttttactcacctgacaawwagtagcccccttgactaccttacnnnnnnnnnnnnnnnnnnnnnnnnnnnnnnnnnnnnnsccctctgcccttatctcakyactagktnnnnnnnnnnarannnnawaccnnnnnnnnnnnnnnnnnnnnnnnnnngattcatccatctcccatatargctgaataatctctattstcccatacaacccatsacttacaattatsaatstaattatctacatcatatkaacactagctgtattcttaatwctacatacccactstttctcgtstatcaaaactatatcactactaygaaataaagcaccagcattattaccaatcatarccmtarttttattatcaacaggaggactcccaccacttagcaggatcat

SEQ ID NO: 1494 - DNA, 515 bp, Cricetulus griseus
  misc_feature (320)..(337): n is a, c, g, or t
gaagagatggctcgtcaccttcgtgaataccaagacctgctcaatgtyaagatggctcttgacattgagatwgccacctacaggaagctrctggaaggcgaggagagcaggatttctctgcctcttcccaacttttcttcmctgaacctgagagaractaatctggagtcactccctctggttgacacccactcaaaaagaacactcctgattaagacrgtggaaacyagrgatggacaggtgatcaatgaaacctctcagcatcaygatgaccttgaataaaaattgcacayactcygtgcaacaacgcagtaccagcnnnnnnnnnnnnnnnnnnttygtatcttaaggaaacagctttcaagtgcctttactgcagtttttcaggagcgcaagwwasatttgggatagaaataagctctagtttctaacaactgacaccctaaaagatttagaaaaggtttacaacacaatctagtttacgaagaaatcttgtgctagaatacttttcaaag

SEQ ID NO: 1495 - DNA, 369 bp, Cricetulus griseus
taccaccatgtgtttagaacagtgtgaagcactcagtttcatgtcagtaaccatctaagaagttttgctcagtggaataaacatatgttttatcagtgttgcctatattttcccacttggattctttcagtgagtcattgtcaacagttcctttaaatgcaaataaattctaaaaatttaccacttttttgagttttttaatgtaaaatttcttaaacttaaggactgtctcttatagaactctgcatgccaatcatttccctataaattaacttggtaaccctcaccaaatatcgcaagtaatggttatctggtagaatggtttggcagaactaggaaggctcctgtctacttgagacagtactattt

SEQ ID NO: 1496 - DNA, 1271 bp, Cricetulus griseus
gtttggctcctcctcagcatcttatccgagtggaaggaaatwtgcatgccgartacctggatgacaagcaramwtttcggcacagtgtggtggtrccmtatgagccacctgaggttggctctgactgtaccaccatccaytayaactacatgtgyaatagttcctgcatggggggcatgaaccggcggccyatcctyaccatcatcacrctggargaccccagtggkaacctgctgggacggaacagctttgaggttcgtatttgtgcctgycctgggagagaccgtcgtacmgaggrmraaaatttccaraaraarggagaaccttgcccagarctrcccccaaagagtgctaaacgagcattgcctaccaacacaagctcctctccccmgccaaagaraaaaacacttgayggagaatatttcacccttaagatccgwggtsawgarcgcttcaagatgttycaagarytgaatgaggccttggaaytgaaggatgcwcaggcttyraaggsgtcagaggacartggtgctcactccagctacctgaagtccaagaagggccagtctgcctcccgtcttaaaaaactaatgatcaagagagaggggcctgactcggactgacytccttcctmkgcctcctgtsccccaycagcaacytcccawcccccwcctccttycctgmcattttgtcacttgggtgcttgaaccccrgcytgggtrgatctgtcatctctgwtatctggggagggtggtgggatacaccarkacaccakctyagcttttargattctgrccatgaggaaaggaagaaaattctcaataggtggkgtkrgaatttacaaytggccatgtgcarkgtgaggccccacccaaytctctaagaaagccatctgagtttactttctcctgacttgaaagccacatctrtaaaatgcagatgrgcatacctgcttctcagggtttsttgtgatacttgtgatacttgtcccttccrcaccwtttattaccttgtggcctggactcwgycccctctgtgagtsctggttcctggcccctrttgggkgrtrggttrsyagstsycwgststctgctggcccagcgaaatcctatccagccacttgwtggaccctggcacctaaaatgaaatttcaccccrccckaywcsctgtaagattctatcttgggctctcatrgggtccatawccaccaagacccattttctttccaccctgcactcrggatcagtttctttgaactctgcccagcctt

SEQ ID NO: 1497 - DNA, 555 bp, Cricetulus griseus
  misc_feature (538)..(555): n is a, c, g, or t
gtggaaagtgttggagatattaaatcatgttgccatttattctcttttccacgctgcttcctctcatatttactgaatctgaacagcaactgtggttctgcaactcctccgatgcaactttttcctacagttactgtgatagcatgaagttccctttttcgattactgctgaaccctgtataacattgaagggaaccaatggatttttacatattaagttcatcccaaggagagacttaaaaaaattatatttcaacctctccatcaatgtcaactccatagaggtgccaactcgaaaagaaattatttgccacggatatgatgacaattattctttctgcaaagctctgaaaggagagactgtgaatacagtagtaccattttccttcaagggaatactatttcctaagggccaatacagatgtgttgcagaagccattgtaggggataatgaagaaaagttattttgtttgaattttaccatcattcaccaccctaatgtcaattagaataaattaagaatatatgtttttatttnnnnnnnnnnnnnnnnnn

SEQ ID NO: 1498 - DNA, 8305 bp, Mesocricetus auratus
  misc_feature (380)..(393): n is a, c, g, or t
  misc_feature (2765)..(2793): n is a, c, g, or t
  misc_feature (3654)..(3668): n is a, c, g, or t
  misc_feature (5428)..(5445): n is a, c, g, or t
  misc_feature (6451)..(6469): n is a, c, g, or t
aggagagagaggcgtctcaagatggcggctcccagagcctcctgcccgagcttttaagcgggagcatccgggcaaatagttagagcggcagcgctcagtggcctccagattctcgggagtaggtgctctgcagttttgagaagctttaaaggacacgagccgattgagaagggggggaaagagccaaagggaaggaggatagttaagatggcggcctccatggagtcgtccaccgctgtctaaggagccgcttctccgtgaaagctgccttagacgaaagggggtgtgtgaagaattaagggtctccttcccgctcagtgacttattcccactgcatccttaagcggaactatggcttcggctgtgtcccccgccaactnnnnnnnnnnnnnnctgcagccccgctggaaacgagtggtgggttggtcgggtccggtgccccgaccccgccacggccaccgtgccgtggctatcaaggagctcatagtggtgtttggcggcggtaacgaaggaatagtggacgaactacacgtgtacaacactgcaaccaaccagtggttcatcccagctgtgagaggggatattcctccagggtgtgcagcctatggctttgtgtgtgatggtactcgcctgctggtatttggtgggatggtggagtatggaaaatacagcaacgacctctatgaactccaggccagtcgctgggaatggaagagactgaaagcaaagacacccaaaaatgggcctcctccatgtcctcggcttggacacagcttctcccttgtgggcaacaaatgctacctatttgggggtctagccaatgatagtgaggaccccaagaacaacattccgaggtacttgaatgacttatatatcctcgaactgcggccaggctctggagtggtagcttgggacatccccatcacttacggagtcctgcctccacctcgggagtcgcatactgctgtggtgtacactgagaaggataataagaaatcaaagctggtgatctatggagggatgagtggctgcaggctaggggatctttggaccctggacatcgagacactgacatggaataagcccagccttagtggggtggcaccccttcctcgaagcctccattctgcaactaccataggaaacaaaatgtatgtatttggtggctgggtgcctcttgtcatggacgatgtcaaagtggccacacacgagaaggagtggaagtgtaccaacacactggcttgtctcaaccttgataccatggcttgggaaaccatcctgatggatacactggaagacaacattcctcgagctcgagctggtcactgtgctgttgccatcaatactcgtttgtatatttggagtggccgtgatggctaccgcaaggcctggaacaaccaggtctgctgcaaggacctgtggtatctggagacagaaaagccaccacccccggcccgagtacaactcgtacgagctaacactaattcactggaggttagctggggtgcagtggcaacagccgacagttaccttctgcagctccagaaatatgacattcctgccacagctgctacggccacttcccctactcccaatccagtcccatctgtgcctgccaaccctcccaagagccctgcgcctgcagcagctgcacctgctgtacagccactgacccaagtaggcatcacacttgtgccccaggctgccgctgcacccccaagcactaccaccatccaggtcttgccaacagtaccaggcagctccatttctgtgcccactgcagccagggctcaaggtgttcctgctgttctcaaagtgactggtcctcaggctacaacaggaaccccactggttactatgagacctgctggtcaggctggaaaagcccctgtcactgtgacctccctgcctgctagtgtgcgaatggttgtacccacacagagtgcccaggggacggtgattggcagcaacccacagatgagtgggatggctgcattggctgctgccgctgctgccacacagaagattcctccttcctcagcacccaccgtgctgagtgtcccagccggcaccaccattgtcaagacagtggctgtgacacctggcacaaccactcttccagccactgtgaaggtggcctcctcccctgttatggtgagcaacccagccactcgcatgctaaagactgcagctgcccaagtggggacatctgtgtcctctgctgccaacacatctacccgccctatcatcacggtacacaaatcaggcaccgtgacagtggcccagcaagcccaggtagtgaccacagtggtcggcggagtcaccaagaccatcaccttagtgaagagccccatctctgtcccaggaggcagtgccctgatttccaatctcggaaaagtgatgtcagtggtccagaccaaaccagttcagacttcagcagtcacaggccaagcctctacaggccctgtgactcagatcatccagaccaaagggcctctgccagcagggactatcctgaagctggtgacatcagcagatggcaaacccacaaccatcatcaccaccacacaggctagtggggctgggtccaagcctaccatcctgggcatcagtagtgtctctcccagcaccaccaaacctggtacgactaccatcatcaagaccattcccatgtcagccattatcacccaggcaggcgccacaggtgttaccagcactcctggcattaagtcccccatcacaattatcaccaccaaggtgatgannnnnnnnnnnnnnnnnnnnnnnnnnnnnatcactgctgtccccaagattgctactggccatgggcagcaaggagtgacccaggtggtgctgaagggagcccctgggcagccaggcgccatcctccgcactgtgcccatgagtggcgtccgcctggtcacccctgtcactgtctctgctgtcaagccagctgtcaccacattggttgtgaagggcaccacaggtgtcacaaccctaggcacagtgacaggcactgtctctactagccttgcaggagctggggcccatagcaccagtgcctctctggccacacctatcactaccttgggcaccattgccactctctcaagccaggtgatcaatcctactgccatcacagtatcagctgcacagaccacactgacagctgctggtgggcttacgacacccacaatcacaatgcagcctgtctcccagcctacccaagtgactctgatcacagcacccagtggggttgaggcccagcctgtacatgaccttcctgtatccattttggcctcacctactacagagcagcccacagcaacagtcaccatcgctgactcaggccagggtgacgtacagcctggcactgtgacactggtgtgctccaacccaccctgtgaaacccatgaaacaggcaccaccaatacagctactaccactgttgtggctaaccttggaggacatcctcagcctacccaggtgcagtttgtttgtgacagacaagaggcagctgcttctcttgtgacctcagctgtgggacaacagaatggtaatgtggtccgtgtctgttcaaaccccccttgtgagacccatgagacaggcactaccaacactgccacaacagccacttcgaacatggctgggcannnnnnnnnnnnnnnccccccttgcgagactcatgagacaggcaccaccagcactgccactacagcaatgtccagcatgggcactgggcaacagcgagacactcgtcatacctctagcaatcccactgtagtgcggatcactgtggctcctggggcactggagagaacccagggtactgtgaagcctcagtgccaaacacagcaggccaatatgaccaacaccaccatgactgtgcaggctaccagatctccgtgcccagctggcccactgctcaggccaagtgtggcactggaggctgggaaccatagccctgcctttgtacagctagctcttccaagtgttagagttgggctgagtggccccagcaacaaggacatgcccacagggcaccagctggagacctatcatacttatacaaccaataccccaaccacagccctctctattatgggtgctggggagcttggtacagctcgattgatccccacatctacttatgaaagcctccaggcaagctctcccagcagcaccatgactatgacagctctagaggcactgctgtgcccttcggctaccgtgacccaagtctgctccaatccaccgtgtgagacccatgagacgggcaccaccaacactgccactacctccaatgcgggcagtgcccagcgggtatgttccaacccgccttgtgagactcatgagacgggaaccacacacacagctaccactgccacatcaaatggaggtgcaggccagcctgagggtggacaacagcctgccggtggccgtccctgtgagacacaccagaccacttccactggcaccactatgtcagtcagtgtgggtgccctgcttcctgatgccactccctctcatggaaccttggagtctggcttagaggtggtagcagtgtccaccgtcacctcccaggctggtgccacattgctggcttctttcccaacacagagggtatgctccaaccctccttgcgagacccacgagacaggcaccacgcacacagccaccactgtcacctctaacatgagctcaaaccaagaccctccaccagctgccagtgaccagggagaggtggtgagcacccaaggtgacagcgcaaacatcaccagctccagtggtatcacaacaactgtgtcatccacattgccacgagcagtgaccactgtgacacagtctacaccagtgccaggtccctctgttccgaacatctcatcactgactgagaccccaggggctctgacttccgaagtccccatcccagccacgataacagtgaccatagccaacacagaaacttctgacatgcccttctctgctgttgacatcctgcagcccccagaggaactccaggtctcaccagggcctcgtcagcagctgccaccacggcaactcctgcagtctgcctctacccccctgatgggggagtcctccgaggtcctgtcagcctcccagacccctgagctccaggccgccgtggatctgagcagcactggggacccatcttcaggccaggagcctaccagctctgctgtcgtggccactgtagtggtccagccacccccacccacacagtctgaagtagatcaattatcacttccccaagagctgatggctgaggcccaggcgggtaccaccacccttatggtaacagggctcaccccagaggagctggctgtgactgctgctgctgaagcagctgcccaagctgcagccactgaagaagctcaagccttagccatccaggctgtgctccagnnnnnnnnnnnnnnnnnnatggcaggcactggggagcccatggatacatctgaagcagcagcagcagtgacacaagcagaactgggtcacctttcagctgagggccaagagggtcaggccaccaccatacccattgtgctgacacagcaggagcttgcagcccttgtgcagcagcagcagcagctccaagaagtccaagctcaagcccagcagcagcaccacctccctactgaggctctggccccagccgacagtctcaatgacccatccatcgagagcaactgcctcaacgagctagctagtgctgtacctagcactgtggccttgttaccctcaacagccactgagagcctggctccatctaacacatttgtggctccccagcctgttgttgtagccagcccagcaaagatgcaggctgcagctaccctaactgaagtggacaatggcatcgagtccctgggtgtgaaaccggacttgccacccccacccagcaaagcccctgtgaaaaaggagaaccagtggtttgatgtgggggtcattaagggtaccagtgtaatggtaacacactattttctgccaccagatgatgctgttcagtcagatgatgactcaggcacaatcccagactataaccagctgaagaagcaggagctacagccaggcactgcgtataaatttcgtgttgctggaatcaatgcttgtggccgggggccctttagtgagatctcagccttcaagacgtgtctacctggtttcccaggggctccttgtgccattaaaatcagcaagagcccagatggtgctcacctcacctgggagccaccgtctgtgacctccggcaagatcatcgagtactctgtgtacctggccatccagagctcacaggctggtggtgagcccaagagctctaccccagcccagctagccttcatgcgagtatactgtgggcctagcccttcctgcctcgtgcagtcctccagcctctccaatgcccacattgactacaccaccaagcctgccnnnnnnnnnnnnnnnnnnncccgcaatgaaaagggctacggccctgctacacaagtgaggtggttgcaagaaaccagtaaagacagctcgggcaccaagccagccagcaagcggcccatgtcgtctccagaaatgaaatctgctccaaagaagtctaaggctgatggtcagtgaagaagctggccagcatctggatcctccagacccctctgcttcaggaacgccctatagggcctggcccaccctcccaccctgcccacccagcctttgcacttcaccctcaccagccactggctaccattcaatctccccccctttccctctctttttacaataaagaaagcacattttatcattgctgttgggaggaagcagaaggcagattggaaagagcgatgagtaagcaaatgagtgcaagttgtgctccttccttttccccacctgctgccctccctgagctgagtatgactagacagttcggagactttgggaagagaaattaaagctgaaaacaaagaagatagtacccacacttaagcctgcacttgtttgcagctcatcgcccttggcctgagaggcagccaaaggctggaggggggaggagtatcccccaagttccctcaggctttccccagcaaagtctgtctggttctattgtgttgtgttctatcactgtgatttccaggcaccttccatcccttctacaggcttagacagatctgtcttgcccagtaaccccatcggaagtataacacatctcagagacctttctgctaccacttaacacctctctcccttcctctttacaaaaagatgaggggaaagaaagaaggagccttgattagtctgagcagtggctgtgaaatcctcccaatgggcacagagtgccccccagtgatcctggctttggcccaccttgcttgagcctgggggccacatcaacaactgctgcatttgttgtatttttaagttgaaattaatgaagttaacattttttattgtaattttagctttagtgtgtgggggcttatccctttttgttagctgtgtacagaatgtgtatcgtattttctttcttccattttccccccttggctaatcattggcagggatcttttgcggaaaagctgagagagcagctagggcaggagagaaacagagtgtcctgggtaggacctggaagaccctgcctagttccattttcctgttactagacccctgcctacttttggaacagtgtgagacattgacctttattcccctgtgggttagcacttgacatgtagaggcttgcccttgaatgtggagtccaccttcatcagcatcactctcagagactgaccttgaacaatacagcaggggaaggaaacaagtggaacctggccaccttgaaagcagcccaggaagggggtgggtatgccatgtatcccacagaggctgggggtaggtacatgacacaaactcagtaattaatttcatagcattgcccccaagcactggattttttttctctccaggacccaagttttaggcggtgagtaatgcttgcaagcaagttactgaagaacttagaaatggacagccaatgtgttcagccactcaggcccataccccctgaggcctctagtgtattgtatcatatttctctgtggaaaatgtcatgtttagtcaagttggagccctctcgcctggcccctttgttttccctatcctttctcccaagcacccattgatttctcttctgagaacagtactaccccattcatctattgtagagtaatccctgtgactcaatattaccatagtgcgatgttgttttgtgctattttgaacaattaaaagacttttttgaaat

SEQ ID NO: 1499 - DNA, 250 bp, Cricetulus griseus
gatcactaagagagtgaaaagtcttggacatgagcaatctccctttctgatttcttcctgacagtttgccgacctctctgaagctgccaaccggaacaatgatgccctgcgccaggcaaagcaggagtcaaatgagtaccggagacaggtgcagtcactcacctgcgaagtggatgcacttaaaggaactgtgagtaccacccagcagcaaaggcagtgaatggtgagctcaggcgctctggtgaccagg

SEQ ID NO: 1500 - DNA, 416 bp, Mesocricetus auratus
atcacctaggagctgtgttgtttttgacttgtgaattggagttgttgactctcctgtcatctccttccctctttctcatttcttcagaaaggtgcaaagttccttagcgatgcagagatcatccagttggtcaatgccaagcacatcccagcctacaaattggaaaccttaatggaaactcatgaacgtggtgtatctattcgccggcagctcctctccacaaagcttccagagccttcttctctgcagtacctgccttacagagattataattattccctggtatgttatttgattaattaaggaggacttgctttgtagcttgaccctccactgctactttttaaatgtttttcatgtttttaaagtcatcgctgtaagagtccagcaggttaaagtttttgtttgttttccag

SEQ ID NO: 1501 - DNA, 1310 bp, Cricetulus griseus
  misc_feature (1047)..(1192): n is a, c, g, or t
ccccactgtgattaagtacaatgtgactggtgaaaacggaacctgcctgcttgcctctatggccctgcagatgaacatcacctacatgaagaaggacaacatgactgtgaccagagcattgaacatcagcccaaatgacacagctagtgggagctgcagtcctcatgtggtgaccttgacagtggagagcaagaacagtatcctggatttgaagtttgggatgaatggcagttctagcctgtttttcctacaagaagtccggttgaacatgactcttcccgatgccaacgtgtcgtcactcatggcctccaaccaatcactgagagctcttcaggccacggtcgggaactcctacaagtgcaacaccgaggagcacatctttgtcaccaaggagttttccctcaatgtcttcagcgttcaggtccaggctttcaaggttgaaagtgacaggtttgggtctgtggaagagtgtatgcaggatggtaacaacatgctgatccccattgctgtgggtggtgccctggcagggctcgtcctcatcgtcctcatcgcctacctcatcggcaggaagaggagtcatgccggctaccagaccatctagccggtggacaggcgggtgcgcgtgcgccagacgcacaggggcctgttcttatgtccccgagcttagataggtgtggaagggaggcacactttctggcaaactgttttcaaatctgctttatcaaatgtgaagttcatcttgcaacatttactatgcacaaaggaataactattgaaatgacggtgttaattttgctaactgggttaaatattttgctaactggttaaatgttaatgttaccaaagtagagctctaaggaggacaagaaggctttcagaatcgcacggctcccccatttgacttttttaagacttggtgtttggtttcttcatcctgttactcagatttaagccttacaaagggaatctctggcctgacacttgggcgtggtaagggcggctgatctttaggctgcacgctgaagatgctagaagggaagagcaggnnnnnnnnnnnnnnnnnnnnnnnnnnnnnnnnnnnnnnnnnnnnnnnnnnnnnnnnnnnnnnnnnnnnnnnnnnnnnnnnnnnnnnnnnnnnnnnnnnnnnnnnnnnnnnnnnnnnnnnnnnnnnnnnnnnnnnnnnnnnnnnnnnaaaaaggcattatttttatttactttttgtaaagtgatttccagtcttctgttggtgttgagggtggccccgtttctgcactgtgtacaataaaagattcacactgctgacctgtcct

SEQ ID NO: 1502 - DNA, 989 bp, Cricetulus griseus
  misc_feature (603)..(652): n is a, c, g, or t
aatcgggacaggcgctgccggccgcagggtcccctccgtgccggcgccgcagctgccgggcctctcgagtcggtggacgcgtcctcccgccggcctcgcaaccgccgcaccccggcctcggctgcgtcgcgccatggcggcccctggcgccccgcggtcgctgctcctgttgctgctggcaggccttgcacacggtgcctcagcattgtttgtggtgaaagacagcaatggcacagcttgtataatggccaacttctctgcctccttcttcaccatctacgagactggacatggttctaagaactcaacctttgaactgccgtcctctgcagaagtactgaatagtaacagttcttgtggtagagaaaatgtttctgaacccatcctcacaattgcttttggaagcggatatttattgacgctcaacttcacaagaaatgcaacacgttacagtgtccaggacatgtattttgcttataacttgtcagacactcaacatttcctgaatgccagcaacaaggggatccactctgtagactcctcaactgacatcaaggcagacatcaacaaaacataccggtgtttgagtgctatccaggtccnnnnnnnnnnnnnnnnnnnnnnnnnnnnnnnnnnnnnnnnnnnnnnnnnnctgttgaatagcaacttcagcaaggaagagacacgctgcacgcaggatggaccttccccgaccactgtgccgcctagcccctcaccaccacttgtgcccacaaaccccactgtgattaagtacaatgtgactggtgaaaacggaacctgcctgcttgcctctatggccctgcagatgaacatcacctacatgaagaaggacaacatgactgtgaccagagcattgaacatcagcccaaatgacacagctagtgggagctgcagtcctcatgtggtgaccttgacagtggagagcaagaacagtatcctggatttgaagtttgggatgaatggcagtt

SEQ ID NO: 1503 - DNA, 556 bp, Cricetulus griseus
tcgacccacgcgtccgtatggcttcaactccagctacctgaagaagtggtgtcctactggaggaacgagtttgactggaggaagcaggtggagaccctcaaccagtaccctcacttcaagaccaagattgaagggctggacatccacttcatccacgtgaagcctccccagctgccctcaggccgcaccccaaagcccttgctgatggtgcacggctggcctggctccttctatgagttttacaagatcatcccgctgctgactgaccccaaggcccatggcctgagtcacgagcatgtgtttgaagtcatctgtccctccattcctggctatggcttctcagaggcatccagcaagaaaggcttcaatacggtggccactgctaggatcttctacaagctgatgtcacggctgggcttccataaattctacattcaaggcggggactggggctccctcatctgcaccaacatggcccagctggttcccaaccacgtgaaaggcctgcacttgaacatggcttttatctcaagaagtctctacaccctgacccctc

SEQ ID NO: 1504 - DNA, 600 bp, Cricetulus griseus
gtcgacccacgcgtccgccagaattggggagaaagtggagaaaggaatgtgtttgaggcgctttctgagctcataattttaacagctagccattgtttacacggaaaggaaattagaagtcaactcaatgagaaggtggcccagctgtatgcagatttggatggaggttttagccatgctgcctggctgttgccaggttggctgcctctgcctatcttcagacgcagggacagagcccatcgggaaatcaagaatattttctacaaagccatcaagaaacgcaggcagtcagaagaaaaagttgatgacattctccaaacgttactagactccacatacaaggatgggaaccctctgacagatgacgaaatagcagggatgctcatcggcctgctactcgcagggcagcacacctcctccaccaccagtgcctggatgggcttcttcttggccagagataaaccacttcaagaaaagtgcttcttagaacagaaagcagtgtgttgcgaggacctgcctcccttaacttatgagcagctgaaggatctgaatttacttgatcgatgcataaaagaaacattaagactgagacctccaata

SEQ ID NO: 1505 - DNA, 600 bp, Cricetulus griseus
tcgacccacgcgtccgcccagaccatgcgagtgaaacttgcctcccgaatgtggaaagctacaccaaactggggaaccccacacgatctgaggatgtcttggattatggacctttcaaagacacccctgcctatagtcaggatacttttaaggtacactatgagaacaacagccctttcctgaccatcaccagtatgacccgggtcatcgaggtttctcattggggtaatattgctgtggaagagaatgtggacttgaagcacacaggtgcggtgctgaaggggcctttctcccgctatgattaccagagacagcctgatagtggcatctcctccatccgttcttttaagaccatccttcctgctgctgcccaggatgtgtattaccgggatgagattggtaatgtttccaccagccacctcctaattttggatgactccgtggaaatggaaatccggcctcgatttcctctctttggaggatggaagacacactacattgttggctacaacctcccaagctatgaatacctctacaatctgggtgaccaatatgcactgaagatgcggtttgtggaccacgtgtttgatgagcaagtga

SEQ ID NO: 1506 - DNA, 444 bp, Cricetulus griseus
gtcgacccacgcgtccggctccgaaagacggaacgccgccgcgctccgggactacagcctgttgctggacttcgagactgcagacggaccgaccgctgagcactggcccacagcgccggcaagatgaagttccctatggtggcggcggcgctgctgctgctctgcgcggggcgggccgaggaggatgacaagaaggaggatgtgggcacggtggtcggcatcgacctggggaccacctattcctgcgttggtgtgttcaagaacggccgcgtggagatcatagccaacgatcagggcaaccgcatcacgccgtcgtatgtggccttcactcctgaaggcgagcgtctgattggcgatgcggccaataaccagctcacctccaatcccgagaacacggatttcgacgcccagcgcctcatcggacgcacttggaatgacccttca

SEQ ID NO: 1507 - DNA, 394 bp, Mesocricetus auratus
ggctgcagggcaataggtgtaagttggactttgtctactttcaagtataagacaatctggacagggtaaggagatgaagatagatttggagacaatcaaaagaggctgaagtgttttctggattaatatgttcccattcttctgcttagcttggtggaggtgccagcagccgggtccttgcagatgggatgacccggggcccagtggtgcgtcttcctcgtgcttgtgattctgcagaagtgaaggcctggcttgaaacacccgaagggtttgcggtgataaaggacgccttcgatagcactagcaggtgtggaaattatgcttgttttctgtcatagctaaagctattgttgatagagtgcctcttataataactaatgtagcactgtcctgt

SEQ ID NO: 1508 - DNA, 280 bp, Mesocricetus auratus
ttatggcaccgatgataactcaaagtgtgatatgggaagaagggttattgtaaaaagagctttctaaaatagtattttccttgtattaaatggaacttgtcttgttttttttcccccagtgaagctttgccctttttcctgcttttgattgacctttctagagcgagtgcactagcaaagtttgccctaagttcaaactctcaggtgagtcttctttaaaagcctgtagtgtgacattattcctctatatctgtttgcattcttaaaatgagttaatgag

SEQ ID NO: 1509 - DNA, 270 bp, Mesocricetus auratus
atccatcacacattttgtttgttttacttcttactagggcactgagaaagcacttctgaagcttcaggagttctttcctgaaatgcagattctggcagttagtggtaactactgcactgacaagaaacctgccgccataaactggatcgagggaagaggaaagacagttgtgtgtgaagctgttattccagccaaggtggtgagagaagtaagtggtggatgaatgtctatcctactttaaaggcttagtatctctaattgggctgggac

SEQ ID NO: 1510 - DNA, 430 bp, Mesocricetus auratus
  misc_feature (310)..(324): n is a, c, g, or t
atgctttccattaaaatggttgctttctttttgatgcccatctacatgtggcatttttggggcagttaaatgggggtcacatctacacccttgcttcctagaggtaaatgtgagtgtgtcttgcttgattcccctgggggagtatgtaaaatgtgcacactgtgctctaggtattaaagacaactacggaagctatgattgacgtaaacattaacaagaatcttgtgggttctgccatggctgggagcataggaggctacaatgcccatgcagcaaacatcgtcactgctatctacattgcatgtggccnnnnnnnnnnnnnnnttcctgttgtgtggtatttggattgtgttctgacaaataaagcttgcttagagtcagaaggcagagctagctactagctaaccgtagaggtttggaggattgtttt

SEQ ID NO: 1511 - DNA, 437 bp, Mesocricetus auratus
gtatgtcattgctctctatccaggggtgcgtcagcttgaaatcatgtgctgctttggctgcatgtctgtgcttgccaactacttcgtgttcatgacatttttcccagcgtgtgtgtccctggtccttgaggtaagaatggttttcctggtggcattagttaagagtatttctccttctgtcacttcaactaaatcagctgtgtatctcctaatgcattgctgacttactttgtagctttctcgggaaagtcgagagggtcgtccaatttggcagcttagccattttgcccgagttttggaagaagaagagaataaaccaaaccctgtaacccaaagggtcaagatgattatggtaatgacatttttcttgtccagtatttgtaatttcaatgtttcttatgctttgggtatttggagactttctgtgtttttagttt

SEQ ID NO: 1512 - DNA, 166 bp, Mesocricetus auratus
tgtttggtttgtgcttcaggatgaagtaagggaaaatatagctcgcggaatggcaattctgggccccacattcacccttgatgctcttgtggaatgtcttgtaattggagttggcaccatgtcaggtttgtaaacaatttctattacaactaaggaggtcattaaa

SEQ ID NO: 1513 - DNA, 970 bp, Mesocricetus auratus
  misc_feature (863)..(877): n is a, c, g, or t
gtttgaatggtgatgggaacactgcttttattagccacataacaaactgatcatgataaggtgaggccaaggaagatagtgtctggtgatgcacttgagaggtgagaaggcagagggtgcacaattaattgaaaatttgtttcttcagtctttaggtttggttcttgttcatgctcacagtcgatggatagctgatccttcccctcagaatagcacaacagaacattctaaagtctccttgggactggatgaagatgtgtccaagagaattgaaccaagtgtttctctctggcagttttatctctccaagtaagttgactgaaccccacagtacgctgcactcttacatggttgcgctgtgacatttctatttctgatctggcctgttaattgttaatctgtttactctcacctaggatgatcagcatggacattgaacaagtggttaccctgagcttagcttttctgttggctgtcaagtacattttctttgaacaagcagagacagagtccacactgtctttaaaaaatcctatcacgtctcctgtcgtgaccccaaagaaagctccagacaactgttgtagacgggagcctctgcttgtgagaaggagcgagaagctttcatcggttgaggaggagcctggggtgagccaagatagaaaaggtactttgctgttctcttggtttcagttatcctgtctgagggtgcaccctgaagctgagttcgtttcaaggtgatgttgtctttttgcctctcacacagttgaggttataaaaccattagtggtggaaactgagagtgcaagcagagctacatttgtgcttggcgcctctgggaccagccctccagtggcagcgaggannnnnnnnnnnnnnnttgaactccccagtgagcctcggcctaatgaagaatgtctgcagatactggagagtgccgaggtgagggcgagggtgtgcactcacacttggg

SEQ ID NO: 1514 - DNA, 369 bp, Mesocricetus auratus
tatttgactcctgctgattttattgttaccactttgctttctgctctgttggaagtgaaagtgaaagaactgtactgtatttttccttttctacttccaggatgcagcacagaatgtggggagttcaaactgtattactttaatggaagcaagtggtcccacgaatgaagacttgtatatcagctgcaccatgccatctatagagataggaactgtgggtggtgggaccaacctcctaccacagcaggcctgtctgcaggtatgtgtcttacacacaacaaaatggcctcaggcttcattgttctggtttattttctctttcttactgactaaaacacacttgggaagggagggcttatttcaactttt

SEQ ID NO: 1515 - DNA, 771 bp, Mesocricetus auratus
  misc_feature (277)..(295): n is a, c, g, or t
  misc_feature (672)..(686): n is a, c, g, or t
atggaagggaagtggttgctgtgtatgttactggtgcttggaactgctattgttgaggctcatggtggacatgatgatgacatgattgatattgaagatgatcttgatgatgttattgaagaggtagaagattcgaaatcgaaatcagattccagtactcctccatctccaaaggtcacctacaaagctccagttccaacagggggagtttattttgctgactcctttgatagagggtctctatcagggtggattttatctaaagccaaaaaagatnnnnnnnnnnnnnnnnnnnccaaatatgatggaaagtgggaggtagatgaaatgaaggacacaaagcttccaggtgataaaggacttgtactgatgtctcgagccaagcatcatgccatctctgctaaactgaacaagcccttcctgtttgacaccaagcctctcatcgttcagtatgaggttaattttcagaatggaatagaatgtggtggtgcctatgtgaagctgctttccaagacctcagaactcaacttggatcaattccacgacaagactccccagccagatgtgaaggaagaagatgggaaggaagaagagaagaacaagggggatgaagaggaagaaggagaagagaagcttgaagagaaacagaaaagtgatgctgaagatgatggnnnnnnnnnnnnnnnagatgaggaagatagaaaacctactgcagaggaggatgaaatcttgaacagatcaccaagaaacagaaagccacgaagagagtga

SEQ ID NO: 1516 - DNA, 1779 bp, Mesocricetus auratus
  misc_feature (277)..(295): n is a, c, g, or t
  misc_feature (1474)..(1479): n is a, c, g, or t
  misc_feature (1680)..(1694): n is a, c, g, or t
atggaagggaagtggttgctgtgtatgttactggtgcttggaactgctattgttgaggctcatgatggacatgatgatgacatgattgatattgaagatgatcttgatgatgttattgaagaggtagaagattcgaaatcgaaatcagattccagtactcctccatctccaaaggtcacctacaaagctccagttccaacaggggaagtttattttgctgactcctttgatagagggtctctatcagggtggattttatctaaagccaaaaaagatnnnnnnnnnnnnnnnnnnnccaaatatgatggaaagtgggaggtagatgaaatgaaggacacaaagcttccaggtgataaaggacttgtactgatgtctcgagccaagcatcatgccatctctgctaaactgaacaagcccttcctgtttgacaccaagcctctcattgttcagtatgaggttaattttcagaatggaatagaatgtggtggtgcctatgtgaagctgctttccaagacctcagaactcaacttggatcaattccacgacaagactccctatactaaaatgtttggtcctgataaatgtggagaahactacaaactgcacttcatttttcgccacaaaaaccccaagacaggtgtatatgaagaaaagcatgctaagaggccagatgcacatctgaagatgtattttactgacagaaaaactcatctttacacattagtcttgaatccagacaatagttttgaaatattagttgaccagtttattgtgaacagtggaaatctgctaaatgatatgactcctgctgtaaacccttcacgtgaaattgaggacccagaagaccagaagcctgaggattgggatgaaagacccaaaataccagatccagatgctgtcaagccagatgattgggatgaagatgcccctgctaagattccagatgaagaggccacaaagcctgaaggctggttagatgatgagcctgagtayatyccagacccygatgcrgacaagccagaggattgggatgaggatatggatggagaatgggargctcctcagattgccaaccctaaatgtgartcagcccctggktgtggagtcyggcagcgacctkwgattgacaaycccaattataagggcaaatggaagcctcccatgattgacawtcctaactaccagggagtctggaaaccaaggaaaataccaaatccagatttctttgaagayctagaaccttttaagatgackcctttyagtgctattggtttggagctstggtccatgacytctgacatyttttttgacaactttatcattagtggtgaccgaagrgtrgttgatgattgggccaatgatgggtggggcctgaagaaagctgctgatggggctgcygakccaggtgtagtggggcakatgctggargcagctgaagagcgtccgtggctstgggtggtctacattctgactnnnnnnttgccagtgtttcttgtgatcctcttctgctgctccggaaagaaacagtccagtgctatgcagtacaagaagacagatgctccccagccagatgtgaaggaagaagatgggaaggaagaagagaagaacaagggggatgaagaggaagaaggagaagagaagcttgaagagaaacagaaaagtgatgctgaagatgatggnnnnnnnnnnnnnnnagatgaggaagatagaaaacctactgcagaggaggatgaaattttgaacagatcaccaagaaacagaaagccacgaagagagtga

SEQ ID NO: 1517 - DNA, 502 bp, Cricetulus griseus
gtcgacccacgcgtccggcagtccgttgctgaaaattataagctctgcatagtgttagctttactgtgattacatctgtttcttattttaagcaggcccgtacctttccagggtccaactacaggatagattacagacttcattagtgtctatttcttttactctgtgtagacttaagaaagtctaatccagaggtgggccaattcagaattgactgtaattgaacatagattaaaagtattgatgggaggcttgacacatagcatgagttatttgacttttgtaggatatttaaaatcttcatttgcagttcatgtaacagttgcgtcttaaaattcacacaataaagcagtcctgttcaaaattttttttattgtggcttgaagagttttttaaagtgaatttagagttgttttgtttttgatgtgaaatgcagatgggtgctagaagagcctcttccccatcactacagtgtaataatattacaccatactgaaatgta

SEQ ID NO: 1518 - DNA, 578 bp, Cricetulus griseus
gtcgacccacgcgtccgcccacgcgtccgtgaggataagctgaggccctagctctcccctgtgctggtggtgcccggctgcccgccgtgatgcagtggtccttgggccggcggtgggcatggatcgccctatttctggctgttgccgcggtgctgacccaggcgggggggctgtggctgggtactcagaacttcgtcttccagcaagaagagatagcgcagcttgctcgacagtacgctggactggaccatgagctggccttctctcggctgatcgtggagctgcggaggctgcacccaggccacgtgctgccggatgaggagctgcagtgggtgtttgtgaacgccggcggctggatgggcgccatgtgtcttctgcacgcctcgctgtctgagtacgtgctgctcttcggcaccgccctgggctcccgtggccattcggagcgatattgggctgagatttctgacaccatcatctctggcactttccaccaggggagagagggcaccacgaaaagtgaagtcttctacccatgagagacagttgtacacggacctggaaaggcaacggccttggga

SEQ ID NO: 1519 - DNA, 2259 bp, Cricetulus griseus
  misc_feature (385)..(406): n is a, c, g, or t
tcggaaccggacgtgtccgcgaagatggcgggccggagtatgcaagctgcgaggtgccctaccgatgaattgtccttaagcaactgtgcagttgtgagcgagaaggattaccagtctggacagcatgtgattgtgaggacctcccccaatcacaaatacatatttacactgaggacccatccgtcggtggttcccggaagcgttgcattcagcttacctcagcgaaaatgggctggactttctattgggcaggaaatagaagtcgccttgtattcatttgacaaagccaagcaatgcatcggcaccatgaccatcgagattgactttctgcagaaaaaaaacatcgactccaacccatatgataccgacaagatggcagcagaannnnnnnnnnnnnnnnnnnnnnaggccttctcagtgggacagcagcttgtctttagctttaatgataagctcttcggattactggtgaaggacattgaagccatggaccctagcatcctgaagggagagcctgcatcaggcaaaaggcagaagattgaagtcggactggttgttggaaatagtcaagttgcatttgaaaaagcagaaaattcatcgctcaatcttattggcaaagctaaaaccaaggaaaatcgccagtcaatcatcaatcctgactggaactttgagaaaatgggaatcggcggtctggataaggagttttcagatattttccgacgagcatttgcctctcgggtgttccctccggagattgtggagcagatgggttgtaaacatgttaaaggcatcctgttgtacggcccccctggttgtggtaagactctcttggctcgacagattggcaagatgctgaatgcgagagaacccaaggtggtcaatgggccagaaatccttaacaaatatgtgggagaatcggaggcgaacattcgtaaactttttgctgatgccgaagaggagcaaaggaggcttggtgctaacagtggcttacacatcatcatctttgatgaaatcgatgccatctgcaagcagagagggagcatggctggcagcaccggagttcacgacaccgttgtcaaccagctgctgtccaagattgatggcgttgagcagctgaacaacatcctggttattgggatgaccaatagaccagatttgatagatgaggctctccttcgacctggaagactggaagttaaaatggagataggcttgccagatgagaagggtcgactgcagatccttcatatccacacagcaaggatgagaggacatcagttactgtctgcagatgtggacattaaggaactggccgtggagactaagaatttcagtggcgctgagctggaaggtctggtgcgagcagcacagtcgacggccatgaaccgacacataaaggccagtacgaaagtggaagtagacatggagaaagcagagagtctgcaggtgacaagaggagacttcctggcttctttggagaatgacatcaaaccagcttttggcacaaaccaagaggattatgccagttacattatgaatggaatcatcaagtggggtgaccctgtgacccgtgtcctggatgacggagagctgctggtccagcagactaaaaacagtgaccgtacgcctctggttagcgtccttctggaagggccccctcacagcgggaagactgccctagctgcaaagatcgcagaggaatccaactttcccttcatcaagatctgctcccccgataagatgattggcttttctgagacagccaagtgtcaggccatgaagaagatctttgatgatgcttacaaatctcaactcagttgtgtggtggtggatgacatcgaaaggctacttgattatgtccccattggcccccggttctccaacctggtgttgcaagctcttcttgtgttactaaagaaggcacctcctcagggccgcaagcttctcatcatcgggaccaccagccgcaaagatgtccttcaggaaatggagatgctgaatgccttcagcaccaccatccacgtgcccaacattgccacaggagagcagctgctggaagctttggagcttctgggcaacttcaaagataaggaacgcaccacaattgctcagcaagtcaaagggaagaaggtctggataggaatcaagaagttactaatgttgattgagatgtccctgcagatggaccctgagtatcgggtgaggaaattcttggccctcttgagagaagaaggcgctagccccctggactttgattga

SEQ ID NO: 1520 - DNA, 465 bp, Cricetulus griseus
gtcgacccacgcgtgcgggcgttgtggagtctccgacgacggctgcgtcgccgccagctcggcatccttgaacgctgccgagccgccgacgccgcagacatggagcccgagccgcagcccgagcaggtcacgctgctggtgaagagtcccaaccagcgtcaccgggacttggagctaagtggcgaccgcagttggagtgtgagccgccttaaggcccacttgagccgagtctaccccgagcgcccgcgcccggaggaccagaggctaatttattctgggaagctgctgttggatcaccagtgtctccgagacttgcttccaaaggaaaagcgacatgttttgcaccttgtgtgtaatgtgaagaatccctcaaaaatgctagaagccaaaacaaagggtgctgaatccacagagcagccagctaacactgatcaggcacagcatcctcaggcacagcatccgggg

SEQ ID NO: 1521 - DNA, 545 bp, Cricetulus griseus
gtcgacccacgcgtccggtagtgaaagcggtgtaccgaactgctttggccctgcaggtaggttccctgtgctggcagctggacatccgcgagtgggaggacctgcgagcgatcgcgagggatccttgtctgccaggaggtggaagaacatcctccgcacaggttcaacatttggactcatctgatgacagctcctgactccaagtgactgacatacacctgttgtttcttgggtaacataccaggggctgcgatggacctggttctcaatgttgccgatcactacttctttactccatatgtgtatccagccacgtggccagaggacaacatcgtccgacaaactattagtctcctgattgtcacgaacctgggtgcttatatcctctacttcttctgtgcaaccctgagctattattttgtctatgatcattcattaatgaagcatcctcagtttttatagaatcaagtctctcgagagatcatgttcacggttaagtctttgccctggataacgatccctaccatttcattgttcctgctgga

SEQ ID NO: 1522 - DNA, 600 bp, Cricetulus griseus
gtcgacccacgcgtccggactgcaccttccaccagtgtgtgcgactcagcaagtttgactctgaacgaagcatcagcttcatcccacctgatggagagtttgaactcatgagatatcgtaccaccaaggacatcatccttcctttccgggtgatcccattagttcgggaagtgggacgcaccaaactggaggtcaaggtggtcatcaagtccaacttcaagccctcacttctggcccagaagattgaggtgaggatcccaaccccactgaacacaagcggggtgcaggtgatctgcatgaaggggaaggccaagtacaaggccagcgagaacgccattgtatggaagatcaagcgcatggcaggcatgaaggaatcacagatcagcgcagagattgaacttctgcccactaatgacaagaagaagtgggctcgaccccccatctccatgaactttgaggtgccattcgcgccttctggcctcaaggtgcgctacttgaaggtatttgaaccgaagctgaactacagtgaccatgatgtcatcaaatgggtgcgatacattggccgaagtggcattaatgaaacccgctgctagctgccta

SEQ ID NO: 1523 - DNA, 2004 bp, Cricetulus griseus
gcgaccgccacctccaatgcacaaggtgtcacatttgaaaagaaacctgagcccgggggagaaggcgctgagagaccctggcctggctagtgcaaactgcgcggcagggcgctgggcagcctggagaacccagagagctccaccgcagaccatcctagcgacctgattctgggatctcggctccacgctcccttcgcaattttcagatttctctccctcgattatttccccaaaacggaacctttataccaagagaaggtgccggagctggggcaaccaggactttcccggrcacccaagatgcgctccattagraaacggtggaccatctgcactataagtctacttctgatcttttataagacaaaagagatagcmagaactgaggagcaccargagacgcaactcatcggagatggtgaattgtgtttgagcagatcacttgtcaacagctctgataaaatcattcggaaggctggctcaaccatcttccaacattctgtacaaggctggagaatcaattcttctttagtcctggagatacggaagaacattctccgtttcttagatgctraacgtgatgtctctgtggtcaagagcagyttyaagcctggtgatgtcatccactatgtgttggacagacgccggacgctaaatatttcccatgatctgcacagcctcctgcctgaagtttcaccaatgaaaaaccgcaggtttaagacctgtgctgttgtyggraaytcyggyattctactagacagtgratgtggcaaggagattgacagtcacaattttgtaatcaggtgyaatctagctcctgtggtggagtttgctgcggatgtggggactaaatcagattttattaccatgaacccatcagttgtgcaragagcatttggaggctttcggaatgagagtgacagagmaaartttgtgcatagactttccatgctgaatgacagtgtcctttggatccccgctttcatggtcaaaggaggagagaarcacgtggaatgggttaatgcattaatccttaagaayaagctgaaagtgcgaactgcctatccatcaytgagacttattcatgctgtcagaggttactggctgaccaacaargtgcccatcaaaagacccagcacaggcctyctcatgtacacactggccaccagattytgtgatgaaattcacctgtatgggttctggcccttccctaaggatttgaatggaaaagcygtsaaataycattactacgatgacttraaatatagatacttttccaacgcaagccctcacagaatgccrttagaattyaaaacmctgaatgtgctacacaacagaggagcrctaaarctgaccacaggkaagtgcatgaagcaataaagcacatattgaaggatcaaaactggatagaaactttttctaaagatgcttctggagatttagaaacaggatccaaaacaaggctggggttcagcatccacactgactgaatagctgaaatggaagtccatgggaatccaccaccagctgatgaaatacctgccaagtgctctaactataaaatattctgacttcaagggtcctagtaagtgccacttccacgaagaatacagtttgaatgtattatcagtagtgtttacaagatccaacagtgcactcatcattaattagcaaagcaaatatgttcgtcactgtggggcagccgctgtaatgccaagcacactggaagaggaactcaggagcatcacgactcggagcttgggaaattaacatccttatccgcagaaatgaagaagaaaaagaattcaaacagtgaaatccatgagatgaagtaacttgaaggaatgtcttcagtcaggacactgagagtgatcatgtgtgtgttttgcttgtgtttttgtttgtcttctgaaacttgttttcttttgggtatggggtgaatagaaattcatctgaggtacagaaatgggaaatacatgacagagaaaaataaacatcaaacag

SEQ ID NO: 1524 - DNA, 600 bp, Cricetulus griseus
gtcgacccacgcgtccgcatccattcaaggcctacctggatgtggatattaccctctcctcagaagctttccacaactacatgaatgctgcaatggtgcatgtcaacagagccctcaaactcatcattcgtctcttcctggtagaagatctggttgactccttgaagctggctgtctccatgtggctgatgacctatgttggtgctgtttttaatgggatcacccttctgattcttgccgagctgcttgttttcagcgtcccaattgtctatgagaagtacaagacgcagattgatcattatgttgggattgcccgggatcagaccaagtcaattgttgaaaagatccaagcaaagcttcccggaatcgccaaaaaaaaggcagaataagcacatggaaaccagaagtgcaacagttactaaaacgccatttaatagttataacatcgtcacttgtaccatgaaggaacttgctcagtgtcagcttgagcctggctccaagctgtctgttctttttaatctggtgttctctcccctgcttttccctttaccctcaggtccaagcacaagatgtgttagactcgaaaaaaagaactggtct

SEQ ID NO: 1525 - DNA, 1253 bp, Cricetulus griseus
  misc_feature (72)..(97): n is a, c, g, or t
  misc_feature (166)..(216): n is a, c, g, or t
  misc_feature (663)..(707): n is a, c, g, or t
gctttcagctctggataatctcctcaaccactccagcattttcctcaagggtgcccggctcatcccagagannnnnnnnnnnnnnnnnnnnnnnnnnatgacaacgttagagaaagtcatcaatgacacctgggcctggaagaatgcaactctggctgagcaggcnnnnnnnnnnnnnnnnnnnnnnnnnnnnnnnnnnnnnnnnnnnnnnnnnnncaagatgatggccctggaccgtgaggtacagtatctgctcaataaggccaagtttaccaagccccggccacgacccaaggacaagaatggcacccggacagaacctcccctcaatgctactgctggtgaccaagaggagaaggtcattccacctgcaggtcagcctgaagaggcaaagcccattttagaacctgacaaagaagagactactacggaaccaacagactctgagcctctggaattaggaggtcctggagcagaatctgaaccgaaagagcagacagcaggacagaagcggtcttcgaagaatgatgaactataacccccccctcctgtatccccactgtstsgcctscagccccttctcctaccacctctatttattatacatcagggttggggcaaggggtgggttttgcccttagggsstcaagttccttctctcannnnnnnnnnnnnnnnnnnnnnnnnnnnnnnnnnnnnnnnnnnnncatgagtgaaatgatctagttctgtccccagctccacgctctggtctcctactctctggccctgtgtttgggaaaaatcactattgtgtcttaattgtttgcctgtgggtaaatgagagaatggctgsccggttgttggagacctggtaatgggaaggatattttgggacactagagtgcccagtcttctctgagtatcatttcattctttgctgttccacaaaatcagtgtcctgtttgggccagtgtctacagagcctcatcaccacctttggcttcccagtgcctctttttctcttctgtgtcttctctttcccctgcccttcctccttggctcttctgtctgtctttgccttcccagtacagattgggcctcgtgcgaattcgccgacaccatcataaccaaagcaacatttaccaaaacatggaaataatgatagcagaaacagtcaatgagctaaatattttccttttccttttttttagatacggtctcgctctgttgcccaggctggcagtgaacttccgaggccttcggtccagatg

SEQ ID NO: 1526 - DNA, 505 bp, Cricetulus griseus
gtcgacccacgcgtccggccaatttggagcatcaactccactgtgctacagcagtgctgagatggttgcgatcctgctgctcctctgtcttcccttcatcttctgcctggccacaccaagaatcaggaaaatgctgtcttgtgggatgtgtacatctaatgtccagcttcctgggaaggtagccatagtcaccggtgctaacacaggcattgggaaggagactgctaaagacctggcccaaagaggagcccgtgtgtatttagcttgccgggatgtgcagaaaggggaacaggtggctagcgagatccaagccaccacagggaataatcaggtcttggtaaggaaactggacctagctgataccaagtctattcgagcctttgccaaagacttcttagctgaggaaaagcacctccacatcctaatcaacaatgcaggagtgatgatgtgcccctactccaagactgcagatggctttgagatgcacattggagtcaaccacttg

SEQ ID NO: 1527 - DNA, 83 bp, Cricetulus griseus
caacagctatggtgtcagtaatcaacaccgtggacacctctcatgatgacatgattcatgatgcccatatggactattatggc

SEQ ID NO: 1528 - DNA, 551 bp, Cricetulus griseus
ctattcagctggatgggttaaacgcgtcacagataagagagctcagagaaaagtctgaaaagtttgccttccaagcagaagttaacaggatgatgaaacttatcatcaattctttgtacaaaaataaagagattttcctgagagaactgatttcaaatgcttctgatgctttggacaagataaggctcatctcactaactgatgaaaatgcacttgctggaaatgaagagttaacagtcaagattaagtgtgataaagagaaaaacctgctgcatgtcacagacactggtgtaggaatgaccagagaggagttggttaaaaaccttggtaccatagccaaatctggaacgagcgagtttttaaacaaaatgacagaggcacaagatgatggtcagtcaacttctgaactgatcggccagtttggtgtcggtttttattctgccttccttgtatcacataaggtcattgtcacatctaatcacaacatcgatacccagcacatctgggaatctgattccaacgaattctctgtatttgctgacccaggagga

SEQ ID NO: 1529 - DNA, 269 bp, Cricetulus griseus
ccgcgcggctggaggtgtgaggacctgakgctcggggtgggggcggaggcggctcctgcgaccgaagaggacttgcgactcgccgtccgcgcaccatgagggtcctgtgggtgttgggcctctgctgcgtcctgctgaccttcgggtttgttagasctgacyacyaastcgatgtggatggyacagtasaakatgacctggstaaaagcacagaaygctcaaggacagatgatgaagttgctgcatagagaggaagaagctattgagct

SEQ ID NO: 1530 - DNA, 600 bp, Cricetulus griseus
gtcgacccacgcgtccgcgctgaaagagctggtggaattgggtgaccatggggatgtgggcatcggtggacgctatgggggacttccctgcggagaagcgaatcttcggggcggtgttgctcttttcctggaccgtgtatctgtgggagaccttcctagcacagcggcagagaaggatatacaaaacaacaactcgggtaccagtagaattagaacagatcatggattcggacacatttgagaaatctcgactgtatcaactggataaaagtacattcagcttctggtcaggactctattcagtggtggaaagcactcttattcttctctttggaggaatcccttacctctggagactttctggacgggtctgtgattctgctggctttgggccagaatatgagatcattcattctttggtgttccttctgttggccacactctacagtgctctgactggcttgccatggagtatgtataatacttttgtgatagaagaaaaacacggcttcaatcaccagactttggagttttttatgaaagacacactcaaaaaatttgctgggactcaatgcatcttattacctgtgtcttcccttc

SEQ ID NO: 1531 - DNA, 600 bp, Cricetulus griseus; identical to SEQ ID NO: 1530

SEQ ID NO: 1532 - DNA, 2436 bp, Mesocricetus auratus
  misc_feature (820)..(837): n is a, c, g, or t
  misc_feature (1544)..(1544): n is a, c, g, or t
ggcacacccaggggatccagtttggggacaggcagatttcagaagcgctgctgagcggctgccccgcagagcccaccatggcgctgkccyacctgaggccctgggcctctctgctgctggtggacatggctttacttgcactgctgcaggggtctccgggaaatctgcttcccctggggcttccaggactrtggctggagggcaccctgcgccttggagggctttgggggctgttagcagtgggggggctgctgggacgtgtggggacctttccgcccttgctctgcctggctaccccgctgtttttctctctaagagcgctggtgggaggcaccatgagttccccagcagtcagagtggyctctgcctcttgggtctggctgctggctgrctatawggcygccgcgctgggctgggccgtgtgggctgtgctgagccctccaggagcccgggagaaggaagcaggccaggagaagaacaagagtctgatgtggcagttgctgaggctctccaggccggacctgcctttccttatggtcgccttcttcttcctggcgtgggctgtgctgggggagaccttaattccccactattccggtcgtgtgattgacatcctgggaagtgattttgacccggatkctttcgccagcgccatcttcttcatgtgcctgttctctgtkgggagctccytgtctgcgggctgccgaggaggctccttcctcttcaccatgtccaggatcaacctgcggatacgggagaggcttttctcctccttgctgcgccaagaccttgggtttttccaggagaacaagacaggrgnnnnnnnnnnnnnnnnnngctcagacacttccaagatgagccgctggctcccttataatgccaacatcctgttgcggagcctggtgaaggtgatcgggctgtactgcttcatgctccaggtgtcgcccaggctcaccttcctctccctgctggacctgcccctcacaatagcagccgagaaggtgtacaacccccgccatcaggcagtgttaacagagattcaggatgccacggctaaggcagggcaggtggtgcgcgaggcggttggagggctgcagactgtgcgcagctttgggrccgaggagcaggaggtcagccgctataaggaggccctggagcgatgtmgacagctgtggtggcgccgggacctggaaagagccttgtatttagccatacggagggtgatggccttgggcatgcaggtactaatcctgaactgcggtgtgcagcagatcctggctggggaggtcaccaggrgaggcctgctctccttcctgctgtaccaggaggaagtgggggactatgtccggaacctggtgtacatgtatggagatatgctgagcaacgtgggcgccgctgagaaggttttctgctacatagaccgtaagccaaatctgccccagcctgggaccctggccccttccaggctggagggccgcgtggaattccaagacgtcaccttttcctacccgagtcgcccggagaagcctgtactcaagggcctnacgttcacgctgcatcctggcaaggtgacggcgttggtgggacccaacgggtcagggaagagtaccgtggccgcccygctgcagaatctgtaccagcccacggggggccagctgcwgctggacggacagcccctggtccagtatgatcaccactacctgcaccgccaggtggttctggtgggacaggagcccgtgctcttctctgggtctgtcaaggacaacattgcctatggcctgaaggactgtgaggatgcccaagtgatggccgctgtccgggcagcctgtgcggacgacttcataggggaaatgcctgatgggatacacacagaaataggggagaaggggagccagttagccgtgggacagaaacaacgtctggccattgcccgggcccttgtgcggaacccacgggtcctgatcctggatgaggcgaccagtgccctggactcccagtgtgagcaggctctgcaggcctggcgatcgaagggggacaggacggtgctggtgattgcccacaggctgcacacggttcagaacgttgaccaggtgctggtgctcaagcaggggcagctggtggagcacagccagctcagggaggaccaggatgtctacgctcacctggtacagcagcagcggctggaggmrtgaggcctccgcacacagagccacccactgagtgctctcaggaccagacccacggggactgtgctggaggctggggtcgggataaagactgggaccatttcggactcttgtatgttttggtgggcttgagtgggtgagagttgggggatggggtggtcgctgggtggagtgagtgttttgtggttctagaaacattattattattttttgctgattatagtaaatatgtatagaaacgttttccctt

SEQ ID NO: 1533 - DNA, 1822 bp, Mesocricetus auratus
agagacaggcgctcagtaagaagtgacagctgtggggacagtatgctggccaaaggactttccttgcgctcagtgctggccaaaggctgccaacctttcttgagccctacctggcagagttcagtgctggctactggagggggagctaatatctctaccaatagccctcgtcccttcaatgagattccttcccccggtgacaatggttggctaaacctgtaccacttctggagggagaatggcacacacagaatccattaccatcacatgcagaatttccagaagtatggccccatttacagggagaagcttggcaataaggattctgtttatattctggaccctgaagatgcagcacagctctttttaagcgaaggtccctacccagaacgatatcttgtgcccccctgggtcgcctatcaccagtattacaagagacccataggggtcctgtttaagagttcagaagcttggaagaaagatagacttgtcctaaaccaggaagtgatggcacctgaagccatcaagaacttcgtgcccctgctggaaggtgtagttcaggacttcatcaacgtcttgcacagacgcatcaagcagcagaagtctggaaatttctcaggggacatcagcgatgacctgttccgctttgcctttgagtccatcaccagtgttgtatttggggagcgcctggggatgttggaggagattgtggaccctgagtcccagcggttcatcgatgccatctaccagatgttccacaccagtgtccccatgctcaacctgcctccagaactttttcgattcttcagaactaagacctggaaggagcatgcagctgcctgggatatgattttcaaaaaagctgatgattatacacagaccttctactgggacttaagacagaagcaagagttcagcaagtaccctggtgtcctttacagcctcctgggtggcaacaagctgcccttcaagaacatccaggccaacattacggagatgctggcaggaggcgtagacacgacctccatgaccctgcagtggagcctttatgagatggcacacaacttgaaggtacaggagatgctgcgggcagaggttctggctgcccggcgtcaggcccagggagacatggtcaagatggtgcagttggtcccactcctaaaagccagcatcaaggagacactgagactccaccccatctctgtgaccgtacagaggtatcttgtggatgacctggtacttcgaaattacaggattcctgccaagatgttggtgcaggtggctaactatgccatgggccgagaacccagcttcttccccaacccaaacaagtttgacccaactcgttggctggaaaaaagcaaaaataccacccacttccgttacttgagctttggctggggtgttcgtcagtgtctgggccggcggattgcagagctggagatgaccatcttcctcatcaatgtgctggagaactttagaattgaactccaaagtctccatgatgtggggaccaagttcaacctcatcctgatgcctgagaagcccatcctcttcaacctccagcctctcaagaaggaccttgggacaaccacgaacagatagggtggcactgtctgaacttcagactggagtcacatggggagatggcccagtgggggcatttgggtgggtgtctctgtatctccagaaaaacctgctcctttggggtggttcttagctctcagtggccaactgcttaggttagccaggccctcctctccttcatcctctctcctttacttaccctgaaggttaataaacacatgaactctgaaaaaaa

SEQ ID NO: 1534 - DNA, 582 bp, Cricetulus griseus
aagtccccgaggtgtgccagctgggtcccacagcttgcggtggtgcttctccagggactcaggtgtgtgcacagcaggggtactcggcggtccggtgctgctcgcaggcaagaagagatcatttaaagattgagaccaagactgaaagaatggctgacctccatcagctcaaggacaatgaggtattgatggcctttgcctcctatgcaactattgttcttaccaagatgatgttcatgagctcggcgactgcattccagaggctaaccaacaagatttttgccaacccakaagactgcgctggatttggcaagggagagaatgccaagaaatttcttcggactgatgagaaggtggaacgggtgcgaagagcccacctaaacgatattgaaaacatcgttcccttccttggtatcggcctcctctactccttgagtggtccakacctctcaacggccctcatgcacttcaggatctttgttggtgctcggatctaccacacaatcgcctacttgactccccttcctcarccaaacagggcctttgcattttttgctggctatggagttactttgtcaatgg

SEQ ID NO: 1535 - DNA, 821 bp, Cricetus cricetus
  misc_feature (445)..(460): n is a, c, g, or t
gccgagtgttgcggccagaagcggagtctcagccgggaggcgctgcagaaggatctggatgacaagctctttggacagcatcttgcaaagaaagtcatcttaaacgccgtgtctggtttcctaagcaacccgaagcccaagaagcccctgaccctctccctgcacgggtggacaggcacgggcaagaacttcgccagcaagatcatcgcagagaatatttacgagggtggactcaacagtgactatgtgcacctgtttgtggccacgctgcacttcccccacgcctccaacgtcaccctgtataaggaccagctacagatgtggattcgaggcaacgtgagtgcctgtgctcggtccatcttcatctttgacgagatggacaagatgcacgcaggccttattgacgccatcaagcctttcctagactattatgacgtggtagacnnnnnnnnnnnnnnnnaggccatcttcatcttcctcagcaacgccggggcagagaggatcacagatgtggctttggatttctggaaaagtgggaagcagagggaagaaatcaagcttagagacatggagcatgccctggccgtgtcggtcttcaataacaagaacagtggcttctggcacagcagcctcattgaccggaacctcattgattattttgtccccttcctgcccctggagtataagcacttgaaaatgtgtatcagagttgagatgcagtcccgtggctatgaagtagatgaggacattataagcaaggtggctgaagagatgacattcttccccaaggaggagagagtcttctctgacaagggctgcaa

SEQ ID NO: 1536 - DNA, 2697 bp, Cricetulus griseus
  misc_feature (918)..(935): n is a, c, g, or t
  misc_feature (2606)..(2625): n is a, c, g, or t
  misc_feature (2665)..(2697): n is a, c, g, or t
ctgaccatggcgatggcggcggagcagtgggtgctggtggagatggtgcaggcgctgtacgaggctccagcataccatcttattctggaggggattctaatactttggataatcagactggttttctctaaaacctacaaattgcaagagcgttctgatcttacagccaaggaaaaggaggaactgattgaagagtggcagccagaacctctcgtccctcctgtctcgaaaaaccatcctgctctcaactacaacatcgtttccgggcctccaacccacaacatcgtggtgaatgggaaagaatgtgtaaactttgcctcctttaattttctcgggttgctggccaacccccgggtgaaggctgcagctctagcatctctaaagaagtatggtgtgggtacctgtggacctcgaggattttatggcacatttgatgtccatctggatttggaagagcgcctggcaaaattcatgaggaccgaagaagccatcatttactcgtatgggttttccaccatagccagtgcgattcctgcgtactctaaaagaggggacattgtttttgtggacagtgcagcctgctttgctatccagaaaggcttacaggcatcacgcagtgacattaagttgttcaagcacaatgatgtagctgacctggagcgactgctgaaagaacaagagattgaagatcaaaagaatccgagaaaggctcgtgtgactcgacgcttcattgttgtggaaggattgtatatgaacactggaaccgtctgtcctcttccagaactggttaagttaaagtacaaatataaagcaagaatctttctggaggaaagcctttcgtttggagtccttggggagcacgggcgtggagtcacggagcactatgggatcagcatagatgacatcgacctgatcagnnnnnnnnnnnnnnnnnntctcgcctctgtcgggggcttctgctgcggcaggtctttcgtggttgaccatcagcgcctctctggccaagggtactgcttctcagcttccttacctcccctgctagctgctgccgccatcgaggccctcaacatcatggaggagaatccaggcatttttgcagttttaaagaaaaaatgccaacacatccataaatctctacaaggcatttctggtttaaaagtggtgggggagtccctttccccagcacttcacctccagctggaagagagcactgggtcccgggagaaggatgtgcagctgctccaggaaatggtcattcactgcatgaacgagggcatcgccttgactcaggcgcgctacttggacaaggaagagaagtgccttcctcctccaagcatcagggttgtggtcacggtggagcagacagaggaagagctggagagggctgcgtccaccatcagggaggctgcccaggctgtgctgctgtagggtgcagcccggtgtttcctgccacatcacctgcgggcagaactgctcagactcctccagctgcccacggagtggattgctgcccgccatgcagctgtgacttgagttcacagacataactaatgaatggattttttttataaaggcaggagctgactttagaagaacacagatgacagcatataactgctatttactttgtgccattgggtctgtttggatgctttactatctgtcatttatattcatttttgtttcaaactggagcttcagttttcttctcccatctgtggtaatgatccaataagcactccttcgtattttgtagaaaaggacttagcagctaagaggagctctcgtgtaccacagttaactgtggcagagggagtcaactgcatcttcccagtccctcaggtagagctcaatggtggctgctatgcggagagcactttctgagagttagaaaattcatatagcatattggaatcctagagccttatatgcactagttattattgatgttgtcatttctaatgtgagcttctcttaatagaaaaatattcatactgcttcctaagcaataatatgaatcaaacattattttatttttgtgtaattgactttatatttttatatattctctagtcggttttgtgaagagggttattattctggtccccaaatacagatcatgccctgggtatttttgaatttgtcagatgtcctttttcatggtggttttgtttgggagcatagaactgtgggctttttctaagctgagaaaagtgagaacttttttcatcctgtaaattgctgatgcctcagaaaaacaggatgctctgaaagtgaccttcgagctgtacactggctgctgttctccttggtgagcatgctgagcagtgtaaggcttgcgatacttgccatggagcatgtacatagaaggaaggccgccattccttctcgtgtgcatgggcagagaatcgggtcgctaaaggtcgattccttctcgtgtgcataggcagagaatcgggtcgctaaaggtcgttttatgatgtgcattcatgttacagtgaccggcatcttttgaagtgatctgtgacatttttaatgtttctatttcatacgtgccttgtgattgctgctgctgtgagggctatggtcctgttggggatgggtcnnnnnnnnnnnnnnnnnnnntgaaataaacctccaggagcccacattcctgaaaaagaannnnnnnnnnnnnnnnnnnnnnnnnnnnnnnnn

SEQ ID NO: 1537 - DNA, 1730 bp, Mesocricetus auratus
acaggatctgcctctacagtagtgtgagcaacactgctgcagcagcaaaggctcaggcccacatcctgggaaggacatggccactccctggggtgctgtcttcttcctgctcatgatagcctgtgctggcagcactgtcttctacagagaacagcagacttggttcgagggcgtcttcttgtcttccatgtgccccgctaatgtcagtgccagcaccttttatggaattatgtttgatgcgggcagcacgggaactcggattcatgtttatactttcgtgcagaaagcagcaggacagctcccctttctggaaggtgaaatttttgattctgtgaagccaggactttctgcttttgcagaccaacccaagcagggtgctcagactgttcatgcactcttagaggtggccaaagactcaattcccagaagtcactggaaaaggaccccagtggttctgaaagcaacagctggactgcgtttactgcctgaacagaaggcccaggctctgctcttagaggtagaggagatcttcaagatgtcacctttcctggtcccagatgacagtgttagcatcatggatgggtcctatgaaggcatattagcttgggtcactgtgaactttctaacaggtcaactgcatggccacagccaggagactatggggacccttgacctggggggtgcctccacccagatcacatttctaccccagttttcgaaaaccctggaacaaacacctagggactacctcacttcctttgagatgtttaacagcacttttaagctctatacacatagttacttgggatttggattgaaagctgcaagactggcaaccctgggagccctggaaacagaagggaccgatggacatacttttcgaagtgcctgtctaccaagatggctggaagcagagtggatctttgggggtgtgaaatatcagtatggtggcaaccaagaaggggagatgggcttcgagccctgctatgcagaagtgctgagggtggtgcaagggaaactgcaccagccggaagagattcggggaagctccttttatgccttctcctactattatgaccgagctgccgatacgcacttgattgattatgaaaagggtggtgttttaaaagttgaagattttgaaagaaaagccagggaagtgtgtgataacttggagagcttcacttcaggcagtcctttcctatgcatggatctcagttacatcacggctttattaaaagatggctttggttttgcagatgggacccttttacagctcacaaagaaagtgaacaacatagagacgggctggcctgggggccacctttcacctgctgcagtctctgggcatctccagctgaggctcagcgtgcccttggaaacctgcacttctgaacttctttttacaggaaggagaggactcgggcattttctgcaactacgctggcgaaagcctggcctgaaacccattgactggctttattaggagggagggggtttataatgagtgttgccccttgagcctagtgatttggtcttaatcagttttgcacatctaatgtgaacagctccctaaccacttggcaggtgcacagctggtgccagagtacaaatcttttgagattctttgtatgtcacagagtctgtgaagaaaaaagagtaggtttggaactccatgttagattgcgagttcagagatgggtcattgggaaccaaagaaaaatctcatt

SEQ ID NO: 1538 - DNA, 2460 bp, Cricetulus griseus
  misc_feature (499)..(517): n is a, c, g, or t
cgagagtgtccacttatcttttcttcggttgagtttccaaaactctaatgatgccgctcctctccaacaaaagtttagtttaaaaataacaccactcgtccggctctggtgcccgttttaaaaatggtgcctcggtcttcagcagcgatagttcttttgcaattaagatccgggcggaaacaatgggtaggtgtgcagcggggcagagccgaggttgcttcacagaacctcttgcaggtcaggagggagggtcaggtcatagttgggttttgttcctgctggcgcggaatactcttgcgtgtaggaagcggctctaccgactgccgaggcctctgggattgtgccgggttgctagttagctcagttggcggcggassggcggcccctggcgggtcaccatgtgggccttcccggagttgccgctgccgctgctggtgaatttgttcggctcgctgctgggatttgtggctactgtgaccctcatccctgccttccgtannnnnnnnnnnnnnnnnnncctctgtggccaggacctcaacaagctcagccggcagcagatcccagaatcccagggagtgatctgcggtgctgttttccttatcatcctcttctgcttcatccctttccccttcctgaactgctttgtggaggagcagtgtaaggcattcccccaccatgaatttgtggccctgataggtgccctccttgccatctgctgcatgatcttcctgggcttcgctgatgatgtactcaatctgcsstggcgccataagctgctgctgcccacagctgcctctctacctctcctcatggtttacttcactaactttggcaatacaaccattgtggtacccaagcccttccgctggattcttggcctgcatttggacttgggaatcctatactatgtctacatgggactgcttgcggtgttctgtaccaatgccatcaacatcctagcaggaattaatggcctagaggctggtcagtcactagtcatctctgcttctatcattgtcttcaacctggtagagctggaaggtgattatcgggatgatcatgtcttttccctctacttcatgataccatttttttttaccaccttgggattgctataccataactggtacccatcacaggtgtttgtgggagataccttctgttattttgctggcatgacctttgccgtggtgggaatcttgggacacttcagcaagaccatgctactcttctttattccacaagtgttcaatttcctctactcgctgcctcagctccttcacgccatcccctgccctcgacaccgcatacccagactcaatccgaagacgggcaaactggagatgagctattccaagttcaagaccaagaacctctctttcttgggcacctttattttaaaggtagcagagcgcctccagctagtgacagttcaccgaggcgagagtgaggatggtgccttcactgaatgtaacaacatgaccctcatcaacttgctactcaaaatctttgggcccatacatgagagaaacctcacactgctcctgctgcttttgcagatcctgagcagcgctgtcaccttctccattcgataccagcttgtccgactcttctatgatgtctgagttccctgaagactgactgcccatagcctccgttggacctcacccaggaccaacctgtctggtccaagactgccttctggtccaggcctctccaactgttggttttttcagttttgttttcagcttctcccatcacctgtaatgattattggcctggaccttattggactttaaagtccattagttgcactttgcccctggctttcttcagcttgctactcttyccctttctgtcccatctgcagcaccataagggggatgtagcagctcttatgcaaatacagctcaactttcagagccctgcatttgctggaccttgagagagaacctgggctatgtgctagagttagggccctatactccaaggtaacctcacatttgactttaaaattaagtgttctgattaggaagatcagaggcagggmtgacatttcagtttgcctcaaatktkactrarggwttggtctttttgcgttccactctaccttgtagcagtagtatgaattcacatgatcccgtaacatgtcaacagtagtcatacagtacatggccttgcaattacttttcaatgcaactttatgataattttttctaactgcttctttatatagaaaatacattatttccttcaggcaggtaaaataactttccaaaaagaaaatactgagaaacaacaaataaaaatatttataccaaacacaaaatgttggattcaagtctaatgagtcctttgcataagaacaaacaatgtgttgtactgtttttttttttaataataagtagacattcagacaggaagataactttaaagttaaaaaaattaatgactttctcc

SEQ ID NO: 1539 - DNA, 600 bp, Cricetulus griseus
tcgacccacgcgtccgcctacctcaacaacccatatgtccggaaggccctccacatccctgagaagctgcctcgctgggacatgtgcaacctcgtggtgaacctacagtaccgccgtctctatcaaagtatgaactcccagtacctgaagctgctcagctcacagaaataccagatcctactgtacaacggcgatgtggacatggcctgcaatttcatgggggatgagtggtttgtggattccctcaaccagaagatggaggtgcagcgtcggccctggctagtggactacggggagagcggagagcaggtagccggcttcgtgaaggagttctcacacattaccttcctcaccatcaagggcgctggacacatggtccccactgacaaacctcgagcagccttcaccatgttctctcgtttcctgaacaaagagccttactgaggggacctatggaagtctgcagtacctgatccagcctctcccagcctctctcagtggagagagatcctaccttatgcagaaagcccctgtggggcaggccctgctctaacactgtctctgacttctcagtcctgtgcatcccagcttaggcctcag

SEQ ID NO: 1540 - DNA, 468 bp, Cricetulus griseus
gtcgacccacgcgtccgccaagacctggcagtgcagcaacgatatcttcctctacaagtaacattgtgcccccaagacaccagaaacctgcaggggccccagcaacaaaaaagaaacagcaacagaagaagaagaaaggaggcaaaagtggctggtgaagacagtgtacttgttgcaggctattgttatccagtgtcagtgacattgggaacataataaaggtaacacagcaagaagcacagagctccctcctccatccccatagtccagaaatgattccttatacttcaaatgggaaaacatcctcctcaaactgcctaatcagatttggcctacttgtaccaaatagctttacgaatactgaagatgactgagcattaaagcacgttatctaaggttcaccaagattcaaatggaaagtgtttgtcctgctccaactagtgaagatatgtgcgcctattcaagtct

SEQ ID NO: 1541 - DNA, 579 bp, Cricetulus griseus
tgttatcttttcattcatccactctgtgccttgtcagcctttgaaagtcttagttgctcccaggctgctattctcagggaccttagaaagggacctggttggtcttgtgacagaatgtgtcttctggggcacactcttccaagaatggccttgtcttcattttcattagggaatgctgcttgcagatgttcagtaaaatctaaatggaatgctcattgcactggttccagcaaggggctgccatgagaccaggagaccacacttggtgggccaatcatgtccttcactacagtgccttagattctcccttatatggactctctgaggccttgctcaagcctcgggttctgtggattgggcagcctgtctgggcccttactcaggacccacaacgtcatcctcattctttctgttcacaaacatctcaaagctctttcattgtgaccctgtgttccttgttgtaaatcacagctagctggctagtcccatgaccctcacaatccaaggtggagaactgtgatgcaggtagagagccatgtgatgactaagtacagaacgtcattgaataaatactgtgta

SEQ ID NO: 1542 - DNA, 600 bp, Cricetulus griseus
  misc_feature (591)..(591): n is a, c, g, or t
gtcgacccacgcgtccgcggacgcgtggctcatatgctgctgcttgacaacccacacaaagaacccctccggttgcggtataagctgactttcaaccagggtgggcagccattcagcgaagtaggagaagtgaaagactttccagacctctctgtcttgaggactgcctaactcctcaaccgagactcttcagttacacttaggccagcgttcctttcactgtctggtcgggactcattgtgatgtgttgcagagtgccaagagttctcttctgatgtcagaccttgattgccaatctctgtagatcatgtgtgtgtgtgcgtgtgtgttattggggtgctgggggaggagggagagctgggcttgggatttgggtagtgtgggggatgctgacaatttctgagatcatctctgctgcactcatttctgcttctgcatgttggttgacactgttgtccctgcctcgggttggagttttatataagccaaagttttttccatgtattgttatcttttcattcatccactctgtgccttgtcagcctttgaaagtcttagttgctcccaggctgctattctcagggaccttanaaagggacc

SEQ ID NO: 1543 - DNA, 375 bp, Cricetulus griseus
gtcgacccacgcgtgcgggggattcattttctacagtgttctggttggtaaagcttcagcaaccgccagtggagactggaacacaaccatagcctgctttgtagccatattaattggcctgtgccttacgttactactactcgccatcttcaagaaggcgctggcgggtctgcccatctccatcacctttgggctggttttctactttgccacagactatctcgtgcagccctttatggaccatcttgcattccatcaattttacatctaacatacctgcagttagaacccatggatgtttcttctttgatcattaaatacctcgagaggacataggggactttcctgtgtcgtcatctaacgaagtcatgactc

SEQ ID NO: 1544 - DNA, 2251 bp, Homo sapiens
gaattcaccatggagctgaggccctggttgctatgggtggtagcagcaacaggaaccttggtcctgctagcagctgatgctcagggccagaaggtcttcaccaacacgtgggctgtgcgcatccctggaggcccagcggtggccaacagtgtggcacggaagcatgggttcctcaacctgggccagatcttcggggactattaccacttctggcatcgaggagtgacgaagcggtccctgtcgcctcaccgcccgcggcacagccggctgcagagggagcctcaagtacagtggctggaacagcaggtggcaaagcgacggactaaacgggacgtgtaccaggagcccacagaccccaagtttcctcagcagtggtacctgtctggtgtcactcagcgggacctgaatgtgaaggcggcctgggcgcagggctacacagggcacggcattgtggtctccattctggacgatggcatcgagaagaaccacccggacttggcaggcaattatgatcctggggccagttttgatgtcaatgaccaggaccctgacccccagcctcggtacacacagatgaatgacaacaggcacggcacacggtgtgcgggggaagtggctgcggtggccaacaacggtgtctgtggtgtaggtgtggcctacaacgcccgcattggaggggtgcgcatgctggatggcgaggtgacagatgcagtggaggcacgctcgctgggcctgaaccccaaccacatccacatctacagtgccagctggggccccgaggatgacggcaagacagtggatgggccagcccgcctcgccgaggaggccttcttccgtggggttagccagggccgaggggggctgggctccatctttgtctgggcctcggggaacgggggccgggaacatgacagctgcaactgcgacggctacaccaacagtatctacacgctgtccatcagcagcgccacgcagtttggcaacgtgccgtggtacagcgaggcctgctcgtccacactggccacgacctacagcagtggcaaccagaatgagaagcagatcgtgacgactgacttgcggcagaagtgcacggagtctcacacgggcacctcagcctctgcccccttagcagccggcatcattgctctcaccctggaggccaataagaacctcacatggcgggacatgcaacacctggtggtacagacctcgaagccagcccacctcaatgccaacgactgggccaccaatggtgtgggccggaaagtgagccactcatatggctacgggcttttggacgcaggcgccatggtggccctggcccagaattggaccacagtggccccccagcggaagtgcatcatcgacatcctcaccgagcccaaagacatcgggaaacggctcgaggtgcggaagaccgtgaccgcgtgcctgggcgagcccaaccacatcactcggctggagcacgctcaggcgcggctcaccctgtcctataatcgccgtggcgacctggccatccacctggtcagccccatgggcacccgctccaccctgctggcagccaggccacatgactactccgcagatgggtttaatgactgggccttcatgacaactcattcctgggatgaggatccctctggcgagtgggtcctagagattgaaaacaccagcgaagccaacaactatgggacgctgaccaagttcaccctcgtactctatggcaccgcccctgaggggctgcccgtacctccagaaagcagtggctgcaagaccctcacgtccagtcaggcctgtgtggtgtgcgaggaaggcttctccctgcaccagaagagctgtgtccagcactgccctccaggcttcgccccccaagtcctcgatacgcactatagcaccgagaatgacgtggagaccatccgggccagcgtctgcgccccctgccacgcctcatgtgccacatgccaggggccggccctgacagactgcctcagctgccccagccacgcctccttggaccctgtggagcagacttgctcccggcaaagccagagcagccgagagtccccgccacagcagcagccacctcggctgcccccggaggtggaggcggggcaacggctgcgggcagggctgctgccctcacacctgcctgagtgatgagcccactgcccaccccctcaagccaatcccctccttgggcactttttaattcaccaaagtatttttttatctgtcgactctagacccgggg

SEQ ID NO: 1545 - DNA, 184 bp, Cricetulus griseus
gtcgacccacgcgtccgattttgagtttgttcagtggttcaagaagttttttgatgcaaattatgatggaaaagatatgaccctgtggctgccagacaaggccaagaaactgcagtggctcccttctcttgtcgctccagctctgagtaaaccgaagaaacctctcaacttcggcagtgcagct

SEQ ID NO: 1546 - DNA, 600 bp, Cricetulus griseus
gtcgacccacgcgtccgtcttgacaagctcctgcggtacgaccatcaacagagactgactgccaaagaggccatggagcacccgtacttctaccctgtggtgaaggagcagtcccagccttgtgcagagaacaccgtgctttccagtggcctcagcgcagcacgatgaagcctggggaatcgacggtctgttgcggttcctcatacttttccataagcagaacaagaaccaaatcaaacgtcttaacgcgtgcgtagcgagatcacgtcctgagagcagacacaaaatggtggcaggcttggcgagcacgaactataccacctgaagggcagcccaccaccgtaaatcagacctcacttccgaatgtaaaaggttcacatgcctttggcttcctgttgacttcctcccgacccagaaagcatgggaaatgtgaagggtatgcaaaaatggttgttggttactgttgctccctgtgcccttgacctgtcccatggctgcctgttgctccagcaaatcccaaggactagctgaccacagactccacagatgggatgggggcagtgtatggcatgatgggcacttacatattattattttaaa

SEQ ID NO: 1547 - DNA, 251 bp, Cricetulus griseus
gtttgactttgaagaaatgaagcgcaagaagaatgacatttatggagaagactaacagcagtacatattatgtaattaggacaaacttaaaatttggcaaataatgtatattatatgaaatcaatattgcaagcccgcttttatgatcaaaatggagattgaagagtgctataccagtaaatactccttcccttcacttttctaatatcatgtattaacttgttttcatggaatggctagtcagaattggt

SEQ ID NO: 1548 - DNA, 700 bp, Cricetulus griseus
  misc_feature (672)..(672): n is a, c, g, or t
agaatcctacctataagttctttgagcagatgcagaactagacaaccgccacagcagcagcctccgaacttggacagcaaaaccattgcttcactacccatcggtgttcatttataaaataacgtggaaagaaacaagcccttctggtttattatttactcatmatcgccttttgacagccgtgctgtaacacaagtakatgcctgaacttgaattaatatacaaatcagtaatgtattctctctttctctctttatattctggtctctacactacattattaatgggttttgygtactgtaaaaaaaaaattasctgyatcaaactagygcatgawtagattctctcckgatwattkatyacacacatagccccatakcccgtkgtatattattmttgtggwtwgwgacacaatywactcctacttgaaatacgctttaaaaatcgatgggggatgcttcgtgtgaacstgggcatttagctgcttctctgkctaagtgtkmttttcmcgatcactatgcattttaaacattgttgagtattccaaatgatttaggaaaatttttccatgattgcatttactgtacagattgctgcctctgctctgtttgtggcatagggtgcgaggatacacattgatttctttgtgcctgttttatgtgcacacattangcattgagaatttgaacttttttttttt

SEQ ID NO: 1549 - DNA, 240 bp, Cricetulus griseus
ccactcgaccaggttctgggctgacaaatatcaagacggaagagatctctgaagtgaagatggatgcagagttcggacacgattcaggatttgaagttcgtcatcaaaaactggtgttctttgcagaagatgtgggttcaaacaaaggcgccatcattggactcatggtgggcggcgttgtcatagcaactgtgattgtcatcaccttggtgatgctgaagaagaaacagtacacatcat

SEQ ID NO: 1550 - DNA, 579 bp, Cricetulus griseus
tgtcattactttgaagaagtcttcagacagtgctttggtttgcctccacaaaaaataaagatttagaaccaggcagaaagcattcactaataaaattattgatgtatgatttttttttagtattgcctcccatgtggaaaactctaacttcatgtggaagttttatttatgttcatctgaactctcccaaaatataatttgcaaaaagcatcaggctccaaaaatagaccatttgaaggcmtgtggtggcgatacagtatgccttattggktcactggtggtttgctcttcagaatctgtgacttcagtactaacacattgaatttcttttgtattgagyygaaatcatwgwttctaaatcagcatttgcgttctcagctggtaatttcattgtaaagaattgattctacttaaagacagaatagcctgggctcgggtcatgtgtgtcatcaccccacccaccccattgtgccttcctgaagatcaggatgggacagtgtagagtgagtgtttgccattcaatagggccacattctgccttttgaagaaggaaagactgtccctaagtgtggagggctc

SEQ ID NO: 1551 - DNA, 579 bp, Cricetulus griseus
gaccgaattggcatttccaagtcagagttagttgcaatgttggaggaagaagagctgagaaaggccattttagtggtgtttgcaaataagcaggacatggagcaggccatgacaccctcagaaatggcaaatgcacttgggttacctgctctgaaggaccgaaagtggcaaatatttaaaacatcagcaaccaaaggcactggtcttgatgaagccatggaatggttagttgaaacgctgaaaagcagacagtaagcccattcacatcaggtcctgtgaagcaaatgctacgccacacactcactgcaaccagccagatgtgcttctgtgactgttagaactgtgtgattgctggcatgtacagaactgactccaatgtttgtaataaatataaaaaacaagtatttggtgagagggttagcttgattgaattacccaaatggtttatgtaatgtaaaatattcttccttgctttcttgtgttaaggcatatgttctatttgtatggaattcttactcaaatacaattctattaaagaatgtacacttttggggggaaccctcctatttttaaattagt

SEQ ID NO: 1552 - DNA, 601 bp, Cricetulus griseus
gtcgacccacgcgtccgcagaaaaatacaatttgacgacatgaggaaaactactgtatctagtagaaataatgatatctaaagtttaccaacaaaagaaccctcgcagactagcaaatacccctctgctctggacatctgaggtcaaatttgaatatggaaataatttccttgcaagcccctagaggcagatcagagaaagcatgcattaagagggaaaggagagaatggaaataaacatgactataatgcagatttatgccttattttttagcatttttaaaatgttgggtctttcaagctgtttttgctttttattagatctatataaataagttaactagcaatttagttttgtatttaagctacaattaatctttcctttggtgatatttatttctttgcctttttttaactttaaatttttaagagttttgttgagtatttagagcttcatcaccatggcaatatgtatttcccttgaagcgttgcaaacaattatactaggagtgcaccctcttaatctttactagttattgtgagattgctgtgtaagttaataaacacatttgtaaatacattgtttgcagggaaaacattgt

SEQ ID NO: 1553 - DNA, 600 bp, Cricetulus griseus
gtcgacccacgcgtgcgggcatcatcattgtcttcaacctgaatgacgtggcatccttggaacataccaagcagtggctcgctgatgcactcaaggaaaatgacccatccaacgtacttctcttccttgtgggttccaagaaggacctgagtactcctgctcagtgttccctaatggagaaggatgccctcaaggtggcccaagagattaaggctgagtattgggcagtgtcctccctcactggtgagaatgtccgggaattcttcttccgtgtggcagcattgacctttgaggccaatgtcctggctgagcttgagaagtcgggggctcggcgcattggagatgttgttcgcatcaacagtgatgacaaaaacctctatctaactgccagcaagaaaaagaccacatgttgtccctgaagagtgaggattatccagaaactgcccattcctggggtactgtgccaccccaacttcagaattcaacccctggacgtttgcactgacttttcagaccaaagagcttccccttgaaagcagcgcccccagagtgtaactgggaccatgctagtctcttcctgcccatggcaccatgccaaag

SEQ ID NO: 1554 - DNA, 593 bp, Cricetulus griseus
ggagggctcggtttccctgcctcgacaacctgaggactctgcacctgctgctgaaaccatgtctagcaatgggacagatgctcctgctgaagcccaggctgctgtggaagatctttttccacagcccagcgtggtggaccgcatggccagcctgcctctcatcagctccacgtgtgagatggtgagcgcagcatacacctccaccaaggaccgatacccccatgtgaggaccgtgtgtgatgtggctgagaaaggcgtcaagaccctcactgcggctgcggtcagtggggsrywkcccwkcytskmcaasctgrrgmcycwgattgcttcggccagcgagtacgcgcaccgagggctggacagattgcaggagagcctgcccatcctccaacagccgactgwkargtgkyctwgcagacactaaggaactggtgtsatstacagtatctggagccaaagaaatagtatccagctcagtgaccagkgcaaaggacacagyggccacccgggtaaccggggcagkggatgtgactcggggggctgtgcagagcaccatggacatgacaaagtcagcagtgaccagcggtgtccac

SEQ ID NO: 1555 - DNA, 579 bp, Cricetulus griseus
tgcctacccatcagcacgtggcccatcccgcagacatcctgttgggctctcagttcctctacaccttcttctcgaagacccatggggacttgcacagcctggtgcgcagccgccgcggtattcccgagcccgaggctattgtgcttttccggcagatggctgctatggtggcacactgccaccaacatgggcttgtcttgcgtgacctcaagctgtgtcgctttgtcttcagcaaccgtgagaggacgaggctggtgctggagaacctggaggatgcttgtgtgataactggaccagacgactctctgtgggacaagcatgcatgccctgcctacgtgggaccagagatactcagctcccgaccatcctactctggcaaatcagctgatatctggagcctgggcgtggcactgttcactatgctggctggtcactatccgttccaagactctgagccggctttgctctttggcaagatccgtagagggacctttgccctgcctgaaggcctatcagccccagcccgatgcctgatccgatgtctccttcgaaaggaaccttcacagcgactagtggccc

SEQ ID NO: 1556 - DNA, 515 bp, Cricetulus griseus
actggggaaagatgggtcaaagtcagagtggtggccatggtcctgggggtggcaagaaggatgacaaggacaagaaaaagaaatatgagcctcctgtcccaactagagtggggaaaaagaagaagaaaacaaagggaccggatgctgccagcaaactgccactggtaacacctcacactcagtgccgcctcaagttactgaagttagagagaataaaagattatcttctcatggaggaagagttcattagaaatcaggagcagatgaaaccattggaagaaaagcaagaggaggaaagatcgaaagtggatgatctcagggggacccccatgtctgtaggaaccttggaagagatcattgatgataatcccgccattgtgtccacatctgtgggctcggaacactacgtcagcatcctgtcatttgtggacaaggatcttctggagccatgctgttcaatcctgctcaaccacaaggtgcatgccgtgataggtgtgctaatggatgacacagac

SEQ ID NO: 1557 - DNA, 444 bp, Cricetulus griseus
ttgtggagtctccgacgacggctgcgtcgccgccagctcggcatccttgaacgctgccgagccgccgacgccgcagacatggagcccgagccgcagcccgagcaggtcacgctgctggtgaagagtcccaaccagcgtcaccgggacttggagctaagtggcgaccgcagttggagtgtgagccgccttaaggcccacttgagccgagtctaccccgagcgcccgcgcccggaggaccagaggctaatttattctgggaagctgctgttggatcaccagtgtctccgagacttgcttccaaaggaaaagcgacatgttttgcaccttgtgtgtaatgtgaagaatccctcaaaaatgctagaagccaaaacaaagggtgctgaatccacagagcagccagctaacactgatcaggcacagcatcctcaggcacagcatccgggg

SEQ ID NO: 1558 - DNA, 309 bp, Cricetulus griseus
  misc_feature (5)..(5): n is a, c, g, or t
  misc_feature (7)..(27): n is a, c, g, or t
  misc_feature (46)..(64): n is a, c, g, or t
  misc_feature (72)..(72): n is a, c, g, or t
  misc_feature (82)..(82): n is a, c, g, or t
  misc_feature (88)..(88): n is a, c, g, or t
cactntnnnnnnnnnnnnnnnnnnnnntcccccccttcgtagtcgnnnnnnnnnnnnnnnnnnntggtcggnacagccgggnacccanccagcgaccagtatgaagcactggcaaggtaacagcggtccttgcagaaacccgatgtcctgaccaccggtaggcgggtaacccaatagggagcataaacttaatatcatgactgctgggtcccgaggtaccccttctggttcaggatgtggttttcactgatgagatggcacattttgacagagtagcgaattcccgagagagtggtacatgcaaaagga

SEQ ID NO: 1559 - DNA, 498 bp, Cricetulus griseus
  misc_feature (135)..(156): n is a, c, g, or t
  misc_feature (161)..(214): n is a, c, g, or t
  misc_feature (246)..(297): n is a, c, g, or t
  misc_feature (321)..(371): n is a, c, g, or t
  misc_feature (382)..(396): n is a, c, g, or t
  misc_feature (398)..(412): n is a, c, g, or t
  misc_feature (414)..(447): n is a, c, g, or t
gtcgacccacgcgttccgggatacacaaattttggacagggattattcctaactataccttacacattagatactactacagcattctcatcaggcacccacatttggcgagatggtaattacgggtggctaatnnnnnnnnnnnnnnnnnnnnnnagctnnnnnnnnnnnnnnnnnnnnnnnnnnnnnnnnnnnnnnnnnnnnnnnnnnnnnntcatacactatagtatgaaacttcgaaacgcnnnnnnnnnnnnnnnnnnnnnnnnnnnnnnnnnnnnnnnnnnnnnnnnnnnnctaccatgagggcaaatatcattnnnnnnnnnnnnnnnnnnnnnnnnnnnnnnnnnnnnnnnnnnnnnnnnnnntaccactctannnnnnnnnnnnnnntnnnnnnnnnnnnnnntnnnnnnnnnnnnnnnnnnnnnnnnnnnnnnnnnntttcatcctaccattcattatcgctgccctagcaatggtccatcttctatt

SEQ ID NO: 1560 - DNA, 261 bp, Cricetulus griseus
gtctttaaccctagagcacaaatggactttgggagcccattccctatggagggatactattgcagcccagatacagcaaggagggccgaggccctcccccaaatgatatgacagactttgaagttccctggtggagggcctcactatccctggggaaaagttggaggatgggttaggggtgttggtggggagcatgggaggatgggagggtgagggaatatggagatggatatgtaaataggagtaatggtttacgaacaa

SEQ ID NO: 1561 - DNA, 579 bp, Cricetulus griseus
cttctcttgagtacagtagcttgacctgtctgctttgatctgcaccttgacagcaagcttccctgttgtgggacatcggggtacctgcaggcaagtgagacctggtcttaatgtgcaaaccctatacctgctctgcaagagcgttggtttcatgggctgcagcagtgggcatagcaagtcgctcatccagtggacttgattggctagtagctaggaagcgggcctttagagagacccaccattgaatggggtttttttttaaacctttggttgtagacaatgaaaaggtagatagccctcttcatgtctatttccctttcaaatagttgcatccaaaagaaagctgttctgtcccatgctctcctactttgctcctctgttaaaataaaaacaggggttgacttatgtcccgctcctgaatacatgtaaaatttgcacaaaactatcttctatgaaaatgatttgtaatctgtagacattacttgggagatgtcttgagatgtaaaatcccatcctttgggttgagggttctttgtttttctccaaataaacccagtctttaaagttgaaaaaaaaaaa

SEQ ID NO: 1562 - DNA, 156 bp, Cricetulus griseus
  misc_feature (15)..(15): n is a, c, g, or t
  misc_feature (32)..(32): n is a, c, g, or t
  misc_feature (102)..(102): n is a, c, g, or t
  misc_feature (121)..(121): n is a, c, g, or t
  misc_feature (124)..(124): n is a, c, g, or t
  misc_feature (150)..(150): n is a, c, g, or t
cagctactccagganaagtggagacattgganctgctgctgatagtgtaagcttttccatgccacggttgctgggtgtttgtccttcctgaggtgaggccancagtgttcctgggagtgtncantctggacacaagtgctgagtcaccantatttt

SEQ ID NO: 1563 - DNA, 555 bp, Cricetulus griseus
  misc_feature (306)..(306): n is a, c, g, or t
  misc_feature (433)..(433): n is a, c, g, or t
  misc_feature (453)..(453): n is a, c, g, or t
  misc_feature (496)..(496): n is a, c, g, or t
  misc_feature (505)..(505): n is a, c, g, or t
  misc_feature (537)..(537): n is a, c, g, or t
ctatattaatcactttctttgtaatcccttcacagtcccaggtttagtgaaaaactgctgtaaacacgggggacacagtttaacaatgcaacttttaatgactgttttctttttccttaacctactaatagtttgtggatctgataagcaagggtgggtggctgagaaaaactctgtgttgggcttaatcagtcactacatccaaaccctaacaggtcaccctggtgaccagggcattcgtataagaaaagcattgtatgtgactctgtgcagcacccccagatgccaccctactctgatcatagngaatcttctgcttaggacaccaaagataagaattagatactactctcctttgtgtataatcttgtagacacttacttgatttttttgtttttttactttttaattctaaacgatacaaaatgctggngtatctatcttttcattcanccagcaaaccagaattagattatgctcattttttttcaaaaanggaagtaancaaaataataaatattgactcctgtgtttatnggctcacacacacacaca

SEQ ID NO: 1564 - DNA, 580 bp, Cricetulus griseus
caatatatgatatataaaccttaagtgaaatgaaaaaaatgatctattgcagataactgatggatgtagttttcttttttaaattagaaatgccacttctattgtattgtctcacacatgctctatataaatgaaaaatgttgattttttgatgatagactatatacacaggctattcccgttacgtaagtcagttctttaggcttatttgctgtgctggttttatttgtttttaatgtaaaaaggcagtattccctttttcaggttgctgagaaacttaagtggaactgaagtgcattgtgatacagttattgaactattttaaagatatagtttctttggaagcctaatgtttccagtgctgggtgcctgagtgcttctataccagctgtcaccaagcaagtctgaggcacctgagctagcccagtgcatatagagagagatccactgtgctttccttcaaatccagttcttccacagcaactagcctatagttagtatgtgctgttcttccactgttgttcactgtggctttttccaatctactttcctttaccaagtgtgtgctcatgtgcagcca

SEQ ID NO: 1565 - DNA, 519 bp, Cricetulus griseus
tctgcctccactccaaccgacaacccacgtctctcctcacctttctggaaattgttcccatagggatccgtagagctcctgagccgcagctggcgcaggccactgtctccgcctgatccattcattggaagccggtcttttctccgaatccaagttccttgcgtgctgccccttagagcggcgggcagcgacatggagaagagcagcgagaccaacggctacctcgacggcacccaggcagagcctgaggccgggccccgcacgcccgagacggcggctaggaaatcgcggcgctgcgttgacttttttcggcgccaggcgctggtactgctcactgtgtcgggggtgatagtgggcgctggtatgggcgcggcgctgcgcgggctgcatctcacccgcactcaggtcttctacctggccttccccggcgagatgctactccgcatgctgcgcatgatcatcctgccgctggtggtttgcagcctggtgtcgggcgccgcctccctggacgccagctcc

SEQ ID NO: 1566 - DNA, 579 bp, Cricetulus griseus
  misc_feature (181)..(195): n is a, c, g, or t
ggtgtagacaagaggatcagcaggttcattctccccattggggccaccgtgaacatggatggcgcagccatcttccagtgtgtggccgcagtgttcatcgcccagctcaacaatgtggacctgaatgcagggcagattttcaccatcctagtgactgccactgcatccagtgttggagcannnnnnnnnnnnnnngggggagtcctcaccattgccattatcctagaggccattggattgtccacagattacctctctctgatcctggctgtggactggattgtggaccggactaccactgtggtgaatgtggaaggggatgccctgggagccggaatcctcaaccatctgaatcagaaggcaatgaagaaaggcgagcaggagctgcaggaagtgaaggtggaagccattcccaattgcaaatctgaggaggagacatcacctctggtgacacaccagaatccatcaggctctctggtcactgctccagaactggaatccaaggagtcggtgctgtgatggggctgggtcttggcccagcctgctagttaccagcaacccaccctggtagcctgccgc

SEQ ID NO: 1567 - DNA, 402 bp, Cricetulus griseus
ggccggcttggtcactatggaggagataggcattttggtggagaaggttcaagatgagatcccagcactgtctgtgtctcggccccagaccggcctgtcctttctggggcctgaacctgaggacctggaggacctgtacagccgcgacaagaaactgcagcaagagctggagttcctggaggtccaggaggagtatatcaaagatgagcagaagaatctgaagaaagaattcctccatgcacaggaggaagtgaagcgaatccagagcattccattggtcattggtcagtttttggaggctgtggatcaaaacacagccattgtgggctctaccacaggttctaactattacgtgcgcatcctaagtaccattgaccgggaactgctcaagcccaatgcctc

SEQ ID NO: 1568 - DNA, 478 bp, Cricetulus griseus
agtggcggctttctccgtctctgaggtgcggcggcgcgctattcggctttcttctgactttcccgcagatttcagaatgtctaccatcttgacttccacttttaaaaacctttctactacatcaaaatgggccctcagattttctgtaagacctctgagctgttcttcccagctacgatctgccccagctgtccagaccaagtccaagaagaccttagcaaaacccaatattaagaatattgtggtggtggaaggcgtccgcattccatttctgctgtctggcacttcctataaagacttaatgccacacgacttggctagaggggcactttcgggtttgttgcatcggtccaatgttccaaaaaatgttgttgattatatcatctttggtacagctattcaggaagtaaaaacaagcaatgtggctagagaggctgcccttggtgctggcttctctgacaagactcctgctcacact

SEQ ID NO: 1569 - DNA, 559 bp, Cricetulus griseus
  misc_feature (39)..(53): n is a, c, g, or t
gtggaagaagcattggtttgtgctgacggattccagccnnnnnnnnnnnnnnnactccaccgccgaggaggcagatgaactggatggtgagatcgacctgcgctcctgcacagacgtcaccgagtatgcagtacagcgcaactatggcttccagatccataccaaagatgccgtttataccttgtcggcaatgacctcgggcatccggaggaactggattgaggctctcaggaagactgtgcgtccaacttcagccccagatgtcaccaagctctcagactgcaataaggaaaacacgctgcatggctgtggcacacagaagggctccctgaagataggggagcagcggacaggctctgaggttatcggccggggtggccctcgcagagtggatggatctcggcagtcactggactacgtggagctctctccattaaccccaagctccccgcagcgcgtgcgcactctgacccgctccacttctgagcgtccacccaaacaggaggatctagagcgggacctggcgcaacgctctgaggaaaggcgcaagtggtttgag

SEQ ID NO: 1570 - DNA, 579 bp, Cricetulus griseus
aattaccctatgactaaaatacactgttcattttactgacctgtgtagcttcgtctcttttaataagtcatatgtccaaaacaagaaaaaccatagtccactttttgcaagtttccccactgtgcacattgctgaagctgcttaggaagggaggtggcgacttggccagcgttcttgacctccattgcatggccctcgaagtagtgtagattgttgccagcacagaggccaatgaacaacaaatgtctttcttaatacagttgttgtcctttgatctgagtagagattgtttgcaatggaaaacaatttgctttaaacttcttgtttttgtaaggtggatttagttttaagcttctgtcccctgagaactacattcatagacaagtcgctttttccagacatagcatataactcttctgaggtaattacttttgtaaggaagctgttcataacataagttattattattattgaacgcacgtggatgtgaaggatttttattgaaaaaccaaatggtttttcctttttctgtcgaatgaacccaatgatttgtctcctgggttatgtgactgtgaacac

SEQ ID NO: 1571 - DNA, 570 bp, Cricetulus griseus
tgtatcctgtcagggataatgtcagtgaatggaaagaaggttcttcacatggatcagaacccgtactatggaggagaaagcgcatctataacaccactggaagatttatacaaaagatttaagttaccaggacaaccaccagcatcaatggggagaggaagagactggaatgttgacttaattcccaagttccttatggccaatggtcagttggtgaagatgttactttacacagaggtcactcgctatatggatttcaaagtgattgaagggagctttgtctacaagggagggaaaatctacaaggttccttccactgaagcagaagcactggcatctagtttaatgggactgtttgaaaaacgccgcttcaggaagttcctagtttatgtcgccaactttgatgaaaaagatcctagaacttttgagggcattgaccctaagaagacctccatgagagatttgtataagaagtttgatttgggccaagatgttgtagacttcactggccattctcttgcactgtacagaacagatgagtaagtagactaatgaatccattggtggctc

SEQ ID NO: 1572 - DNA, 498 bp, Cricetulus griseus
gaaatcatagatcaatatttctctggtgatgatattgatgaagatcctagcctcattcctgaagcaacacaaggaggtacttacaactttgacccaacagccaaccttcaaacaaaagaatttaatttctaaggtctattaagtgcagcaccttttattcaatacaaacaccaccagatggccaccaagcgataagacagcaagcaacagaaggctcccagctctcttgcctcttcgttttgatgcttctaaagcaagccatgtctcagtcactttgcagttgccaaaagtcactctcacatggactgtaaatgcatatgcatgatttcctaaactgttttagaattctccttaacagtctcaactaccctatttttccatgttccctggtgccacatgctacaactgcagtctccagttagaatgttccatagtggtggcaatcggctgtccactgatactgctttggaaaaaggtgcgctgtggatcaagacactg

SEQ ID NO: 1573 - DNA, 428 bp, Cricetulus griseus
gcggttgatgctggctttgttcccaatgacatgcaagttggtcagacagagaaaaatagtagcaccagaactttatattgctgttggaatatctggagccattcaacatttagctgggatgaaggacagcaagacaattgtggctattaacaaagacccagaagctccaattttccaagtggcagattatgggatagttgcagatttgtttaaggtggttcctgaaatgacagaaatactgaagaaaaaataaataaaaatcatatcttaaggaaactatcaaaagtattcagctgaaatcatagaaatataatctgaggaaagaaagtatgctaacagcagctagaatgccttttgatgaatcaattattcctttttaatttttttgtggtcctaaacaattattttttgacattttctaattctgc

SEQ ID NO: 1574 - DNA, 335 bp, Cricetulus griseus
tttctggagacagtgctggtgggaatttggcagctgcccttggacaacagtttacttacgttgccagcctgaaaaataagctcaaactgcaggctttaatctacccagtcctccaggctttggatttcaacacaccctcttaccagcagaacgtgaacactccaatcctgccacgccacgtcatggtgaagtactgggtggattacttcaaaggcaactatgacttcgtacaggccatgattgtgaacaatcacacttcccttgatgtggagaaggccgcagccctcatggcccgtctcaactggacatccctgttgccctcatccatcaaaaag

SEQ ID NO: 1575 - DNA, 179 bp, Cricetulus griseus
  misc_feature (9)..(26): n is a, c, g, or t
tttctgctnnnnnnnnnnnnnnnnnntctcacccgcgccgctcctcgcctctcttgttagcccgagactcgcctctcagccgcccgccgcacagacgcacgagtagacagtgcagctccatcggctgatcctcgctgagctccgagggtaggcggtaccgggcggcccacgatgccgaa

SEQ ID NO: 1576 - DNA, 664 bp, Cricetulus griseus
ggaagagatgaacatgcccacacagatggtgcagggcggtgcctttgacggcaccacagaagggcccttcaaccagggctatggggagggggccaaggagggtgctgatgaggaagagtgggtcgtggctaaagataagcctgtgtrcgatgaactcttttatacgctatcacccatcaatggcaagatatcaggtgtcaatgccaagaaggaaatggtgacctccaagctgcccaacagtgtcctgggcaagatctggaagctggccgactgtgactgcgacggcatgctggatgaggaggagtttgccctggccaagcacctcatcaagatcaagttggatggctacgagctaccgaacagcctgcccccacaccttgtgcccccctctcacaggaagtccctgccaaaggctgactgawgagggcgcaccgctggggtgggaaaggakggggtccctgggcctgaagtatgctatgccactgacttgctgaatgtccttagccaaggytctgtcctctccatatctcagttccctcatacgtagggtagggaakggcagatactggactctagatgaggtcctcttacctctaaaatccctaagtttctatcaaaatatttctatctaaatattgagaagagcactatatatggagattaa

SEQ ID NO: 1577 - DNA, 1175 bp, Cricetulus griseus
  misc_feature (10)..(39): n is a, c, g, or t
  misc_feature (42)..(169): n is a, c, g, or t
  misc_feature (180)..(241): n is a, c, g, or t
  misc_feature (254)..(321): n is a, c, g, or t
  misc_feature (332)..(361): n is a, c, g, or t
  misc_feature (363)..(387): n is a, c, g, or t
  misc_feature (389)..(402): n is a, c, g, or t
taacttctannnnnnnnnnnnnnnnnnnnnnnnnnnnnnctnnnnnnnnnnnnnnnnnnnnnnnnnnnnnnnnnnnnnnnnnnnnnnnnnnnnnnnnnnnnnnnnnnnnnnnnnnnnnnnnnnnnnnnnnnnnnnnnnnnnnnnnnnnnnnnnnnnnnnnnnnnnnnnnaaaatttgatnnnnnnnnnnnnnnnnnnnnnnnnnnnnnnnnnnnnnnnnnnnnnnnnnnnnnnnnnnnnnntcctcatgatatnnnnnnnnnnnnnnnnnnnnnnnnnnnnnnnnnnnnnnnnnnnnnnnnnnnnnnnnnnnnnnnnnnnncttgacttctnnnnnnnnnnnnnnnnnnnnnnnnnnnnnntnnnnnnnnnnnnnnnnnnnnnnnnncnnnnnnnnnnnnnngatgacacggacgacaagacgcaaatactgcagccctacaggcaattttatataatcgcattggggacattggctttgttataacaatagcttgactatgcttaaataataattcctgagaatttcaacaaatctttatatcagaaaacaaaagcctcattcctttactaagcttwckwsymrcagcwmcrggaaaatctgcacartttggactacacccatgacttcrcctcagctatagaaggccctacaccagtctcagctctactacactstagcactatagtagtagcawraatctttytactaakccgctwscacccaataatctcaaataataacactgcycwtactatcatattatgtttaggttccataacaacactattcacagctaatctgtgccgctcacacaaaatgatattgaaaaaatcgtacccttctcaacatcaaaccaattaggcctaataatagtaacatgaggaattaaccaaccacacctagcctttctacacatactgtacacacgcattcttcaaagctatgttattcatatgctccggatcaattatccatagcctaaatgatgaacaagacattcgataaataggaggactattaaaaccactaccattcacctcatcatgcttgataattggaagcctagccctaacaggaataccattgctaacaagcgtttattcaaaggacttaatgatcgaagccgcatacacctgttgtacaaacggcctgacccctatgatttacactcg

SEQ ID NO: 1578 - DNA, 612 bp, Cricetulus griseus
agttccgtctgccccggagctgtctctcaccgagrwccactgccctttggtgcagacagaaagaacaagtagcaactaaacaggagaagaatggctttgaagcagatttccagcaataggtgcttcggggggctccagaaagtttttgaacatgacagtgttgagctgaaatgtaaaatgagatttgctgtctacctaccaccacaagcagagagtggaaagtgtcctgcactctactggctgtctggtttaacttgcacagaacagaatttcatatccaagtctgrctttcagcaagctgcctcagaacatggccttgtcgtcattgctccagataccagcccccgtggctgcaatattaaaggagaagatgacagctgggactttggcactggtsctgggttttacgtgamtgccactgaagatccctggaaaactaattacagaatgtattcttacgtaactgaggagcttccacaacttataaatgccaatttcccagtggacccacasaggatgtctatttttggtcactccatgggaggccacggagctctgatttgtgctttgaaaaatcctggraaatacaaatccgtgtcagcatttgctcca

SEQ ID NO: 1579 - DNA, 533 bp, Cricetulus griseus
catgtcgcaagatcaaggtgaaaaggagaaccccatgcgggaacttcgcatccgcaagctctgcctcaatatctgtgttggggagagcggagataggctgaccagggcggccaargtgttggagcagctcacgggccagacaccggtgttttccaaagccagatacaccgtcaggtcctttggcatcaggagaaatgaaaagattgccgtccactgcactgtccgtggagccaaggcagaagaaattctggagaaaggtctgaaggtgcgggagtatgaattacggaaaaataacttctcagacaccggaaactttggctttgggattcawgaacacattgatctgggcatcaagtatgacccgagcattgggatctatggcctggacttctatgtggtgctgggtargccaagtttcakcatcgcagacaagaagcgcawgacaggctgcattggggccaaacacagaatcagcaaagaggaggccatgcgctggttccagcagaagtatgatgggatcatccttcctggca

SEQ ID NO: 1580 - DNA, 777 bp, Cricetulus griseus
cgactccggaagatgctctgtctccggccacaggtccccctccctttgggctggagtggcgacgccagcacaggggcaaaggtcacctgctgctggctgcgactcctgggctggttgaggaaatgccaccagcccaagaaaaggctgtggcatttgcttcttgggatgacaatgagccctggggcccgtggactgggaacgggaccttctggctgccagctgtgaaaccgtttcargagggtgtctacctggctactgtgcacctgccctatctgcaaggacaggtctccctgcagctgactgtgcacaagtcccccaaagtgtctctgacaccagcaccccttgtgtgggctgccccargagaggcacccccggagctgctctgcctcgtgtcccatttctaccctgcggaaggcctggaggtggagtgggagctcagaggtggtccagaaggcggttccagawaggctgagggggggacgtggctctccaccgtccgccaccattctgatggctctgtcagccaggccgggcacctgcggctccccccagtcactgcccagcagcatggagtccgctatgcctgtcgggtccaccaccccagcctgcccgcatcgggtcgcagtgctgaagtcaccctggaagtggcaggcctctctgggccttcagtcgaggacagcataagcctgttcctgtccgctttcctcctcctgggactcatcaaggcactgggctggatggctgcctacgtgaccttccgtgaagactcaaaggtga

SEQ ID NO: 1581 - DNA, 536 bp, Cricetulus griseus
  misc_feature (226)..(240): n is a, c, g, or t
agcttggcgagcagctggacaacgaacgagttgggatggccaccagctgggggagcatcttgcaagatgagaaacagcttgaggagttggcacagcaggccatataccgggccttggctgagggcgtggtgctgakgyytkykkwkagtcccagctcctctcaagtggtgacctatgccccgttcacgctcttcccctayaccagtccctagtgctctgctggagnnnnnnnnnnnnnnncagatggatttcaacatgctggtggatgctgtcagccagaactcggccttcctggaacaaacatctgtctagcactatcaaaaaggacgactacactgcccgtctctttgatatctacaagcaagtcctgaaagagggcattgcccagactgtgttcctgggcctgaatcgctcagattacatgttccagtgcagcgcagatggctccaaagccctgaaacagattgaaatcaacactatctctgccagctttgggggcctggcctcccggactcctgctgtgcaccgacatgttc

SEQ ID NO: 1582 - DNA, 829 bp, Cricetulus griseus
  misc_feature (740)..(762): n is a, c, g, or t
cgggagcgcccgccgccgccaggcagactgacagagaccagccatggcagacgagccgaagcccatcagtccgcttaagaacctcctggccggcggctttggcggcatgtgcctggtgtttgtggggcaccccctggacacggtcaaggtgcggctgcagacgcaaccgccaagtttgccaggacagccacctatgtactctgggaccatcgactgtttccggaagactcttattagagagggcatcacagggctgtatcggggcatggctgcacccatcattggagtcacccctatgttcgctgtgtgcttctttgggtttggtttggggaagaaactacagcagaaatctccagaggatacacttaactacccacagctgtttgcagctggaatgtkrkskggtgtgttcaccacgggaatcatgacccctggagaacggattaaatgcttgctgcagattcaggcttctacgggggaaaccaaatacactggtaccttggactgtgcaaagaagctctatcaggagtttgggatccgtggcttctacaaagggactgtgctgaccctcatgcgagatgttccagccagtgggatgtatttcatgacatatgaatggcttaaaaatctcttcactccagagggaaagagtgtcagtgacctcagtgtaccccggatcctcgtggctggaggctttgccgggatcttcaactgggctgtcgcaatccccccagatgtgnnnnnnnnnnnnnnnnnnnnnnnccctcctgggaaatatccccatgggttcagaaacgtgctgagagagctgatccgggatgaaggagtg

SEQ ID NO: 1583 - DNA, 582 bp, Cricetulus griseus
  misc_feature (16)..(16): n is a, c, g, or t
  misc_feature (21)..(21): n is a, c, g, or t
  misc_feature (24)..(24): n is a, c, g, or t
  misc_feature (54)..(54): n is a, c, g, or t
  misc_feature (56)..(57): n is a, c, g, or t
cctggagactagcggnacgtncancgacttaggggcactcgctggcaagaatcncnnggaggtacgcccgagggacctcaggaaaccatgcccgaaaccacacagtgaagcagggactgccttcattcagacccagcagctccatgcagctatggctgataccttcctggaacatatgtgccgcctggacattgactccgcacccatcacggcccgcaacactggcatcatttgtaccattggtcctgcctcccggtctgtggagatgctgaaggagatgatcaagtctggaatgaatgtggctcgtttgaatttctctcatggaactcatgagtatcacgcagagactatcaagaatgtgcgaacagccacagaaagctttgcatctgaccccatcctctaccggcctgttgctgtggctctggacacaaagggacctgagatcaggactggactcatcaaaggcagcggcactgcagaagtagagctgaagaagggagccaccctgaagatcaccctggacaacgcctacatggagaagtgtgatgagaacatcctgtggctggactataagaacatctg

SEQ ID NO: 1584 - DNA, 962 bp, Cricetulus griseus
gtcgacccacgcgtgggggaaggcttaacccccaccgtsagcacccaaagctgaaattcttattaaactacttcttgtacatcaacttctagtacataaatttatctagtccataatacattaatgtatatcgtgcattacattatattcccctagcatataagcatgtratacttaattaatgtaataagacatcttatgtaaaatccacataaattatctacaacatgtattttcatctatactatatattaatgtaattccacatatctgcgttatcttacatacaccattttagtcatatccctgctttgccatatgtctatccccgtccccattkggtctaacacatctaccatcctccgagaaaccagcaacccrsscacctctgcccctcttctmgctccsggcccattacaacttgggggtgactaacctgaaactyyaccaggcatctggttctttcttyavggccatgaaatgcatcatcskccmtacgttccccttaaataagacatctcgatggtacgggtctaatcagcccatgcccaacataactgtggkctcgtgcctttggtatcttttatttttcggtatgctgtgactcaccatagccgtcaaggsrkgaaskycaacttattcgtgtagctggacttctctattcaagtgtcatttatccacatatacaatccccaaagacatactattcaatgctttcttcggacatatctttaatttacactagattttcaagccaaacccccctcccccactgataattactaactctgacaaaccccaaaaccagagatttcaataccaggtctctccaccattctagtaatccgccaaacataacttgaatttcaataagtgtaaaatttaccctatcgctttaaaattcctattgacacctagactagttttaatatacaagtgggtgacgggcataaacacgttaa

SEQ ID NO: 1585 - DNA, 346 bp, Cricetulus griseus
  misc_feature (18)..(42): n is a, c, g, or t
aagcttaacgaggacgannnnnnnnnnnnnnnnnnnnnnnnncagaacccacgacagtacaagatcccagactggttcttgaacagacagaaggacgtgaaggacggaaagtacagccaggttctggccaatggtctggacaacaagctgcgagaggacctggagcgactgaagaagatcagagcccacagggggctgcgccacttttggggtcttcgtgtccgaggtcagcacaccaagaccactggccgccggggccgcactgtgggtgtatccaagaagaaatgagycgctgggccttcactgttaataaatagtttatatgcctgtgaaaaaaaaaaagctt

SEQ ID NO: 1586 - DNA, 3883 bp, Cricetulus griseus
  misc_feature (2019)..(2098): n is a, c, g, or t
tcagagaagttagggaggtcgagcagggcaagggttggtagaaacctcgatcagatttcctttccgctcgtcctggtcgcttggacccaggaggaacgtccctgcttgtgtctaggggcggacggtgaacgcgctgcgcacggccccgccagggctggtagtttggagaccgcccctgccgaggtccgctcgcccgggagccctgcggctcccgcggtggcgggagcggcggcggccccaggctcgatccagcccagggagccgcgcctcaggctctgggggcgctgtgaccccgctcctggctgctcctgggacccccctgtcccccagagcacggctgttggagagtgaccccgactgctgctgatggtgcctctgttgctcccctactagcaggagtgattcttcaccggaagtggactttggagaggggttcattagaccagaatggaagccaggcaaggaaatcagctgactcaggagccggagtgagagcgacacaccctccgccccagcctgcaccatgaacttgccttcaccttctgcacgttgagagccaagggaggggtacattgccagagagagatggctttctttactccctggaagttgtcctctcagaagctaggctttttcttggtgacttttggctttatatgggggatgatgcttctgcacttcaccatccagcagcggactcagcctgagagcagctccatgttgcgggagcaaatcctggatctcagcaaaaggtacatcaaagcactggcagaagaaaacagaaacgtggtggatggaccatacgctggcgtcatgacagcttatgatctgaagaaaacacttgctgtactactagataacatcttgcaacgcattggcaagctcgagtcgaaggtggacaatctcgtcaatggcacaggagcaaattctaccaactccaccacagctgtccccagcttggtatcgcttgaaaaaattagtgtggcagttcaacaccccaactccataggatggtgctgcccacacttggaatgggtcttccctgtcagttaaacctctgtggaaacgccctcatagatacaaccagagttatatctccatggcaatcctaaatcatgccagactaacaactgaggattaaccaccacaatgacctaaggcttgacacccacaggaaggaaagacaaattggagctggaggagaggatgaatgtgctggcagctgaagagatggttcagtcaggaagatgcttgttaaacaagcatgaggacccgagttcaaaccccagaacacatgtaaaagagctgagtggagacagctcattggcctgcttcaggttctagcccagcgaaagatcctttctcaaaaaataaaatgcaccgcgcccacacacccccaaggcacagggaacattatagaagacgaagaaaggatgaggaagaggaggggtgccatgaaatgtgaccatccagatatggcatggcaatagaagccatggcagctgtggatactacactacactgtgccctccaactctctgtcatgggtaaaggaggtgcccatgaagccgccgttcctgtggagacactgatggttccaggagactatgccatttctttaatggtgtagccagtggggaccagttgggaaaagaggctcaaggggaaaggaagtgtggcaaaagagagtaaagggagtcaaatgtgatcacaatgcattgtctatgaaactgtcaaaaacaaagcaaaaaaactattggagagcagttggtgaagacacctgatgacaaaccctggcttcccacacagatatcattaatggagttcaagaaaaatgtgtattgcctcctatggatggctacccccactgcgaggggaaaatcaagtggatgaaagacatgtggcgctcggatccctgctacgcagactatggagtggacggcacctcctgctccttttttatttacctcagtgaggttgaaaattggtgtcctcgtttaccttggagagcaaaaaatnnnnnnnnnnnnnnnnnnnnnnnnnnnnnnnnnnnnnnnnnnnnnnnnnnnnnnnnnnnnnnnnnnnnnnnnnnnnnnnntgaggagttccggtggatgagacttcggatccggcgaatggctgatgcgtggatccaagcaatcaagtctctggcagagaaacaaaacctggaaaagagaaaacggaagaaaatccttgttcacctggggctcctgaccaaggaatctggcttcaagattgcagagacggcattcagtggtggccctcttggcgaactggttcagtggagtgacttaattacatctctctacctactgggccatgacatccggatctcggcttcactggctgagctaaaggagattatgaagaaggttgttggaaatcggtctggctgtcccactgtaggagacagaatcgttgagcttatttatattgatattgtgggacttgctcaatttaagaaaactctaggaccatcctgggttcactaccagtgcatgctccgagtgctagattcctttggaacagaacctgagttcaatcatgcaagttatgcccagtcgaaaggccacaagaccccctggggaaaatggaatctgaacccgcagcagttttacaccatgttccctcacaccccagataacagcttcctgggcttcgtggtcgagcagcacctgaactctagcgacatccaccacattaatgagatcaaaaggcagaaccagtcccttgtgtatggcaaagtggatagtttctggaagaataagaaaatctacttggatatcattcacacgtacatggaagttcatgccactgtttacggctccagcacaaagaacattcccagttacgtgaaaaatcatggcattctcagtgggcgtgacctgcagtttcttctccgggaaacaaagctgtttgttgggctgggattcccttatgagggtccagctcccctagaggccattgcaaatggatgtgctttcctgaaccccaagttcagccctcccaagagcagcaaaaatacagacttcttcattggcaagccgaccctgagagagctgacgtctcagcacccttatgcagaagtcttcatcggccggacacacgtctggaccgtggctctgaacaatcgagaggaagtagaggatgccgtgaaagccatcttaaaccagaagggatgctgcagatcggcactcggttctcatgcttacacagcaagcagccgagccatctcccccgtcttggcctcactctgggcagacgcctggaacaggaaagctcagcccaatcagcagagtcggcccgcagctccgctcaatccgcaactccgacccgcgcagcccgcggagctcccgccgccggtctgggcagcatgaggcgcgcggcgctctggctctggctctgcgcgctggcgctgcgcctgcagcctgtcctcccgattgagccgtatatgccgtatgagttcacatgtgaagggatgctgcagagaatcaacgcgttcatagagaagcaggacttctgccatggccaggtgatgtggcctcccctgagcgccttgcaggtgaagctggctgagcctgggcagtcctgcaagcaagtgtgccaggagaaccagctcatctgtgagccatccttcttccagcacctcaacaaggaaaaggacttgctgaagtacagagtgacctgccaaagctcagaactgtacaaggacatcctggtgccatccttctaccccaagagcaagcactgtgtgctccaaggggatctcctgctcttcagttgtgccggggcccaccccacacaccagaggatctgcccctgccgggacttcatcaagggccaagtggccctatgcaaagac

SEQ ID NO: 1587 - DNA, 787 bp, Cricetulus longicaudatus
  misc_feature (76)..(90): n is a, c, g, or t
gggggcccgcacagccaagaacatgaccgagcgccgcgtgcccttctcgctgctgcggagccccagctgggaaccnnnnnnnnnnnnnnncccggcccacagccgcctcttcgaccaagccttcggggtgccccgcttgccggatgagtggtcgcagtggttcagcgccgctggttggcccggctacgtgcgcccactgcccgccgcgaccgccgagggacccgcggcggtggccctggccgcgcccctggccgcgcccgccttccaccgtgcgctcaaccggcagctgagcagcggagtctcggagatccggcagacggccgatcgctggcgcgtgtccctggacgtcaaccacttcgctccggaggagctcacggtcaagaccaaggaaggcgtggtggagatcaccggcaagcacgaagaaaggcaggacgaacatggctacatctcccggtgctttacccggaaatacacgctgcctcccggtgtggaccccaccctggtgtcctcttccctgtcccctgagggcacacttaccgtggaggctccgctgcccaaaacagccacacaatccgcggagatcaccattccggtcactttcgaggcccgcgcccaaattgggggccaggaagctgggaagtcggaacagtctggagccaagtagaagccatcagcctgctgcatccccaacagccatcactcgccacccctctctatcagtctttatgctcttttgatacatgtactttctgtttttctcaaataaaagttggaagctactgccccc

SEQ ID NO: 1588 - DNA, 277 bp, Cricetulus griseus
aatgtcacttagaaaggctaacttggtttattgttcagtgggggtagaaaaagcttcctaaaactgaaatatttcaaggaaactgatcttcaaattctgacattggttattctaagcaactgaaccaattgctcacttggtcataaaataagcaaaaactagattcttcagtgtagcagagactccccagactcattcagttctacttttacaaataagattttacatgtattaggaagattttgtgcaacagaaaagttgtacagaaagtacattc

SEQ ID NO: 1589 - DNA, 580 bp, Cricetulus griseus
tttggacctgcatggtgggatagggacctggtaagacctatttattggaccagaccatgaagtacttacaagtacgtgctgttccttcacatatctgtgaaatttacttaacggtaaatttacttaatggaaatgtttgttttgtctgtgagactgaactagactacaagaatgagtaactgctctagatcttaaggtgaggaaggacagagctttgggaagagctggaggaggagcctgtcaggcataggcaggggtaacccttgttgaactacagtcagtctgtttggtttgctgttggtaaatgagcagtgtgatcttgcttgtgtttctctttttggcttttcatgttaaaagggggcatgtaaggctatcattgataaatagtttactgggaagcctttttggagaatacttacctaaatatcaacatttttctttttaaaataggcttttcatctcagcctagtgatgaggaatccagtagcgatgacaccagtcatgagcccagccctgtcccaagacgccgtcgcaacaagaagaagactgtttctgtctcatagcctgaggagccaccact

SEQ ID NO: 1590 - DNA, 582 bp, Cricetulus griseus
  misc_feature (528)..(528): n is a, c, g, or t
aggagaagtccaattccaacccacactgagcttccggtgtttagagattctaagatgcctgagccagccaagtccgctcccgccccgaagaagggctccaagaaggccgtgaccaaggcccagaagaaggacggcaagaagcgcaagcgcagccgcaaggagagctactcggtgtacgtgtacaaggtgctgaagcaggttcacccggacaccggcatctcctccaaggccatgggcatcatgaactcgttcgtcaacgacatcttcgagcgcatcgcgggcgaggcttctcgcctggcgcattacaacaagcgctcgaccatcacgtcccgggagatccagacggctgtgcgcttgctgctgcccggggagctggccaagcatgcggtgtccgatggcaccaaagccgtcaccaagtacaccagctccaagtgaaaaggacgtcccacgaggagtagacctgatgatgtcttttctaccactcatcagtgctggacgttgtttcatttggcaattgagacaatgganataggtgatactagaagactagtggctgtattttcaaaacttgaggaacaactc

SEQ ID NO: 1591 - DNA, 474 bp, Cricetulus griseus
aaccttgaggggccctctgaccaggagaccaagttggatcttatcagtaaaggagaggaaccaagaggaggaagagaggaatccggggtaccagctcgcagctctccacccagcagcaaaaaccactctatcaaggctatacttaagaatatctcagtcctggctttgtccgtctgcttcattttcactgtcaccattgggttgttccctgctgtgactactgaggttgaatccagcattgccggcaccagtgcctggaagagctactacttcattcctgtggcttgtttcttaaatttcaatgtctttgactggctaggccggagtctcacagctatttgcatgtggcctggtaaggatagcctctggttgccagttttggtgggctccaagatcgtgtttattcccctgcttttgctatgcaaagtgaaacatcgctactacttgcgttccatctttacccacgacgcctgg

SEQ ID NO: 1592 - DNA, 567 bp, Cricetulus griseus
  misc_feature (504)..(504): n is a, c, g, or t
gatttaagcacattcctcgattccagcaaagccctacaacatgaccgagatgagcttcctgaacagcgaagtgttggctggggacttgatgtcccccttcgaccagtcgggtttgggggctgaagaaagcctaaggctcttatatgactacctggaggtggccaagcacttcaaacctcatgggttctccagcgacaaggctaaagcgggctcctccgaatggctggctgtggatgggttggtcagtgcctcatacaccggcaaggaggatgcattctccgggacagactggatgttggagaaaatggatcttaaagagtttgactttgatgctctgtttcgaatggatgacctggataccatgccagatgagcttttggccacgttggatgacacatgtgatctttttgcccctctagtccaagagactaacaaggagcccatgacagtgaacccaattggccatctcccacatagtgcaacaaaaatagaccaagttgcccnctttgcattcttgcaacctttttcctgttccccaagggggcctgtctttcacttcagaatatt

SEQ ID NO: 1593 - DNA, 503 bp, Cricetulus griseus
ggcacaagtctattgtgtctttccgccagctccgtgaggaggttctaggagagctatcaaatgtggagcaagcagctggtgtccgttggagtcgtttcccatacctcaatcgtctgctgaaggggcatcggaagggcgagctgacagtctttacaggacctacaggcagtggaaagacaacattcatcagtgagtatgccctggatttatgtacccaaggggtgaacacactgtggggtagctttgagatcagcaatgtgagactagcccgggtcatgctgactcagtttgctgtgacacggctggaagagcaactggacaagtatgaagagtgggcagatcgctttgaggacctgcctctctatttcatgactttccatggacaacagagtatcaggtctgtaatagacacaatgcaacatgctgtctacgtctatgacgtctgtcatgtagtcattgacaacttgcagttcatgatgggtcatgaacagttctctaccgac

SEQ ID NO: 1594 - DNA, 563 bp, Cricetulus griseus
  misc_feature (3)..(3): n is a, c, g, or t
tgnatcagatcctactctcctcgttcgtgcgcctcgctcgctctttccggcaaccatgtctgacaaacccgatatggctgagatcgagaaattcgataagtcgaaattgaagaagacagaaacgcaagagaaaaatcctctgccttcaaaagaaacgattgaacaggagaagcaagctggcgaatcgtaatgaggcgagcgccgccaatatgcactgtacattccacaagcattgccttcttattttacttcttttagctgtttaactttgtaagatgcaaagaggttggatcaagtttaaatgactgtgctgcccctttcacatcaaagaatcagaactactgaccaggaaggcctcccctgcctctcccacccatctgtcggtctggctggcagggagggaaaagaacttgcatgttggtgaaagaaaaagctgggtgggaggtggtgaaatacagaaaaaaattcaagatggtccaaggtgtcctgcaggatgtaaaatgcagtttgatcagagtgccattttttttgttcaaatgattttaattattggaatgcacaat

SEQ ID NO: 1595 - DNA, 379 bp, Cricetulus griseus
  misc_feature (309)..(309): n is a, c, g, or t
  misc_feature (370)..(370): n is a, c, g, or t
aagtctgatgtcgaacttttaatgttttcagtgttctctaatttttaggagttttttgtagcctttacacctggaaaaaagatttgtaaaatcaccaaaataattgtgtgctttattttttaagtagtgattataggtgttacatcccatagttactgcaagatttattgccgtatattggagcagatgtctcattaacataagagtacttaggaagtgaagtccttttgtgcattttcaacatttatcaactggcaatcagaaaatgtttactgtgaagaggaatctccaacttacatagcccttttnggtatgtttaataattcttaatggggcttgcctgtaagtatgatatgcatagcatcttagngaaatgccg

SEQ ID NO: 1596 - DNA, 174 bp, Cricetulus griseus
  misc_feature (119)..(137): n is a, c, g, or t
agtaagtccttaaaaaacaaagactgctgtcttaggcaagattgattagcacattctgaggtctggtctatttgcccaatggatgggcctggacaatcgtgaccccccaccccaaaaannnnnnnnnnnnnnnnnnnttggggtttttgcctttaaaaaacccctgtgcttggg

SEQ ID NO: 1597 - DNA, 371 bp, Cricetulus griseus
  misc_feature (11)..(11): n is a, c, g, or t
aaaggcccaantggcttccgttaccgtcctccccgtgtgagacaaccccccaccctaccccaccccaccccaccccgagaccgtgtcctttgtttataaaccacacttggtttttccggccggtttgctgccccgctgaggtggacaggcgctagtgtaatggcggggagtcttccttgggtggcaagcaggatcctgtggggcctgacgcccttggcgagctttataagcttctcgcagggagtcccgctgctgacccgcgtcaggctcacccttccgtcccccatagtgttggattgctgggacgagaagagggctctgtttggagtatatgacaacttcggaattctggggaatttcgataagctccc

SEQ ID NO: 1598 - DNA, 473 bp, Cricetulus griseus
acgcaatcagttgcctcaaccatatgtttttccagtctttaaggacaaaagtggcccacagtttaccagtgctctaaaaaatagtcacaaagcacttaaagcattgctaaggtcattggtggatcttcacgatgatttgctttgccagtacccaaacactacatacctattaaatgggatgaaacccaaaactgagagtgaggagatttctagtgaagatgatgagccactagcatagaagaagaagcaaagaaaagccccaccaaagaggaagctacatatggagaactatcccatcttcatggcaaagcgctttgctgattttactgtctacaggaaccgtacactgcacaagtggcatgataaaaccaagcttacttctggaaaactgggcaaaggtttcagtgcctttgaacgctctatattaactcagattgatcacattctgatggacaaagaaagattgcttcaaa

SEQ ID NO: 1599 - DNA, 502 bp, Cricetulus griseus
agctgagcctgtgatatcctcggtcgctcaggatggcctcaggcaaagcacgctgtacccggaagctccgaagttggataatacagcaattggaaagtgggcacttcccaggggtgtgctgggatgacacagccaacactatgtgccgggttccctggaagcatgcaggcaagcaagacttccgaaaggaccaggatgctgccatattcaaggcttgggcactgtttaaaaaaaagcataaggatgaggacataggaccccctgctgtctggaagactcgcctgcgctgtgccctcaacaagagtcctgaatttgaagaggttcctgagagaggccgtatggatgttgctgaaccctacaaagtctatcggatactgccaccacgaaccctccctggccaaccaagaagccagaaatcgccatccaagcgacccaatagtgctgtgtcaccagagagggaagagaataaggagaagggaaggtccagcgggcttgtaaaccc

SEQ ID NO: 1600 - DNA, 581 bp, Cricetulus griseus
atttgtgaatgaagttagaagatgtgaagaaatggatcgaaagcttcgatttgttgagaaagagataagaaaagcaaacatcccaattatggacactggtgaaaacccagaggtgcccttcccccgggacatgatcgacttagaggccaatttcgagaagattgaaaatgagctgaaggaaatcaatacaaaccaggaagctctgaagagaaacttcctggaactgactgaattaaagtttatacttcgcaaaactcagcagttttttgatgagatggcggatccagacctgttggaagaatcgtcatcactcttggagccaaatgagatgggaagaggcacgcctttaagactcggcttcgtggctggtgtgattaaccgggagcggatccctacctttgagcgaatgctttggcgagtgtgccgagggaatgtgttcctgagacaggctgaaatcgagaacccgctggaggatcctgtgactggtgactacgtgcacaagtctgtattcatcatttttttccaaggtgatcagctgaaaacagggtcaagaaaatctgtgaaggggtccgagcctccct

SEQ ID NO: 1601 - DNA, 579 bp, Cricetulus griseus
  misc_feature (396)..(512): n is a, c, g, or t
  misc_feature (572)..(572): n is a, c, g, or t
gtagctgccaagaccaagggccctgcaggggaccgagtccggccactaagtgcccgcagtgagcctgcagacaagccaggccgtgtgcccctcaccaggaagccctcagtccccaagactgtctcaaaagtgtctcctgccacgaggacctcctctgggctcagtggccgcccagtgccacctggggctggctcccctgtctacctggacctggcttacctgcctgggggtggcgcgggccacctggacccggactttttccttcgagtacgtgcactctgctatgtcatcagtgggcagggccagcgccaggaagagggcctgcgggccgtgttggatgcactgctggctggcaagcagcagtgggaccttgacctgcaggtcacactgatcccnnnnnnnnnnnnnnnnnnnnnnnnnnnnnnnnnnnnnnnnnnnnnnnnnnnnnnnnnnnnnnnnnnnnnnnnnnnnnnnnnnnnnnnnnnnnnnnnnnnnnnnnnnnnnnnnnnnnnccctgcctgcatagtggagttctagccacgggccacagcacaccctgaggacagcagctnctcactg

SEQ ID NO: 1602 - DNA, 557 bp, Cricetulus griseus
  misc_feature (519)..(536): n is a, c, g, or t
aaatgagtttaaggaatggcagtacttcaagagcctgcacaggttcactcacatcccttcaggaaagtgcttagatcgatcagatgtccttcatcaagtcttcatctccaactgtgactccaataaaatgactcagaagtgggaaatgaataacattcacagtgtttaagaagagtgcacaaaaccaataatctacctactgacaagtacacttacagaggactgaaaatcgcctggaacctgctgcaaccgttattactaattctgtacagctccaatcctggaacctctgatcagattgaaggacattgataaactgtgatttttacaataacattatcatctgcagttactgtttacaaaactgcttttaccttaaactctgtagatgtttacatcctttttcttttgtttttagatgacgttggtaatttgtgcctttaactccgttcagaacagagttaaagcatatgttgtcttctttgggaatacactcaggggtctgaaaggcagtttggnnnnnnnnnnnnnnnnnngtggcttttaacacacttgaa

SEQ ID NO: 1603 - DNA, 581 bp, Cricetulus griseus
aagttgcttacagtggcagtacccagtctcagaatcacaaggattcccaccaggaattgttcccagaggattgcaagcacatgatttacaaccaaatgggtcttcagcacttaaaccatagaagccttctttacagacatcgcagcgctgtccttcaacatgcaatttgcaccggcactgaccagcaatgagacccgcagagaaatcagtgtaaccgtcacagattcctccattctcagaaccagctgggtcacaggtacatggttcacagagattggggtctcggacgtccctctcggggtgctggtagtagaatggtttgcactgctcgcagttgcgtcccatggtgttgtgctgacagtcatcacacacgcccccgctgacattcccagtggccaagaaaactgccatgtcaaagtgacatgagctggaatgttcattgcagttgcattttttgcaagcattgctgttccgaccttcagcaggtctccatgggaaatcatggtagatatccatgcacagctcacagtttatgcctttggtgttatgcctgcacatgcagtgtccatgaaccattcctt

SEQ ID NO: 1604 - DNA, 522 bp, Cricetulus griseus
  misc_feature (122)..(122): n is a, c, g, or t
  misc_feature (249)..(249): n is a, c, g, or t
  misc_feature (367)..(367): n is a, c, g, or t
  misc_feature (403)..(418): n is a, c, g, or t
  misc_feature (484)..(484): n is a, c, g, or t
  misc_feature (493)..(493): n is a, c, g, or t
  misc_feature (511)..(511): n is a, c, g, or t
gaggcgcgatggcaggtgtaggggtcgagcggctgcaggcgatggtgcgatttacgctgctggtgctcactgtgtgtgctgcgggtgcccatgggctctatttccacatcggcgagactganaagcgttgcttcatcgaggaaatacccgacgagaccatggtcatcggcaactatcgaacccagatgtgggacaagcagaaggaggtcttcctgccctcgacccctggcctgggcatgcacgtagaantgaaggacccggacggcaaggtggtactgtcccgacaatatggttccgagggccgcttcaccttcacgtcccacacacccggtgaccatcagatttgtctgcactccaactccaccangatggctctcttcgctggaggaaaactgcgtgtacnnnnnnnnnnnnnnnntggggagcatgccaacaactaccctgagattgctgctaaagataagttaacagagctgcagctttnagctcgacntttgcttgattaagtggnaacagatccag

SEQ ID NO: 1605 - DNA, 579 bp, Cricetulus griseus
aacacagacaacaacaagaagctgaactgaggcccttgctacagcctgcattgttcacacagcatctgcttccatccccaaaacttgacaaagtcactactctcaggaatcctgccctaaatgccattggagtaccagtgtccctgaggaagccagtctcctatactagtattcttggttccacagagcatcaggggccacaaggaaatctccaagatcttttttcaaaataggaacctaaatgcaactgaattaaaaaaaaaatacctagccatgaagcctactagaagtcttcaggttcatgtcactgataagccaatgctaaacagccaccttggaccgagatcatcaaagatattttctttaagacattcctcacacgttaaacttgagctattttttgttgcttcagatgtatcctttgcatggtcaatggcttcttctgtagaagctttagtcatttgttgaactcttatttagatctaattcaagttttacatagaggcccaggtgtgaatgcagcccattagccacaagaccagagaagaaacagtaaactgtggaaggggtttctgcccc

SEQ ID NO: 1606 - DNA, 580 bp, Cricetulus griseus
gtgatcctctgcaattctgtagagttgatccgtgagaggctgactgtatctgaagatgaaccacaagtggagcaccagaaggaatcaaagcacaatgacgactatgtatatgacatttactatatggagatggcccctccaggatggattgagaacattctgtctgtgcagccctacagccaggagtgggagctggtgaatgatgatcagcaaccagaagatacgtatgaagatgaagatgatgaaaacagtgaaaataattggcgcaatgagtatccagatgaagaaagcagtgatgaagatgaagattctagagactctaatgaatacaacagcctcagcgaggaggaaagaggcagcagacaattgatgtggagcaagtaccctttggatgtacagaaggagtttggctatgataacccccatgatctggattcagattgatagtctcgtgagattcttccacaagcccttgagagctctgtgactgcagtgccatcatcttatgatgccttactggagatgtagaaagaaaaactataccccagcacaatacagacttaactaagggctcttctgc

SEQ ID NO: 1607 - DNA, 167 bp, Cricetulus griseus
  misc_feature (161)..(161): n is a, c, g, or t
agtgtgcctttgagagccctcggtcatattaacttcagtcatttggctggcctcgctcgtgtgagagttctgggcactgctctgcttctttctgcacagagcttcctgttcatcttcccccacgccacgcagcagagagcattcattgtcatgcctgtttncaccct

SEQ ID NO: 1608 - DNA, 520 bp, Cricetulus griseus
gtgtcggaggcgtccgctggaaaatggcggaatacttggcctccatcttcggcaccgagaaagacaaagtcaactgttcgttttatttcaaaattggagcatgtcgtcatggagatagatgttctcggttgcacaataaaccgacctttagccagaccattgccctcttgaacatttaccgtaaccctcaaaactcttcccagtctgctgacggtttgcgctgtgctgtgagcgacgtggagatgcaggagcactatgacgagttctttgaggaagtcttcactgagatggaagaaaagtacggcgaggttgaggagatgaatgtctgtgacaacctatgagaccatctggtggggaacgtgtatgtcaagttccgacgtgaggaggatgcagagaaagctgtgattgacttgaataaccgttggtttaatgggcagccaatccatgcagagctgtccccagtgactgacttcagggaagcctgttgccgccagtatgaaatgggagagtgcacaagagg

SEQ ID NO: 1609 - DNA, 581 bp, Cricetulus griseus
  misc_feature (22)..(61): n is a, c, g, or t
  misc_feature (89)..(141): n is a, c, g, or t
  misc_feature (149)..(205): n is a, c, g, or t
  misc_feature (208)..(220): n is a, c, g, or t
  misc_feature (250)..(289): n is a, c, g, or t
  misc_feature (311)..(336): n is a, c, g, or t
  misc_feature (349)..(433): n is a, c, g, or t
cccccctgaccagcagaggttnnnnnnnnnnnnnnnnnnnnnnnnnnnnnnnnnnnnnnnntccgactacaacatccagaaggagtctnnnnnnnnnnnnnnnnnnnnnnnnnnnnnnnnnnnnnnnnnnnnnnnnnnnnncctgacannnnnnnnnnnnnnnnnnnnnnnnnnnnnnnnnnnnnnnnnnnnnnnnnnnnnnnnnaannnnnnnnnnnnngagggcattccccctgaccagcagaggtcnnnnnnnnnnnnnnnnnnnnnnnnnnnnnnnnnnnnnnnntccgactacaacatccagaagnnnnnnnnnnnnnnnnnnnnnnnnnnactgatgggtggnnnnnnnnnnnnnnnnnnnnnnnnnnnnnnnnnnnnnnnnnnnnnnnnnnnnnnnnnnnnnnnnnnnnnnnnnnnnnnnnnnnnnaagatccaagacaaggatggcattccccctgaaaacagacgtgcatctttgcccgcaatcagctggaagatggcggcaccctgtccgactacaacatccagaaggagtccaccctgcacctggttctacgcctcatgggtgggatgca

SEQ ID NO: 1610 - DNA, 578 bp, Cricetulus griseus
agccaaaccagccctacagatggatatcctacaaacaggtgtctgatcgagcagagtacctgggctcctgtcttttgcacaaaggatataagccatctcaggaccaatttgttggcatctttgctcaaaataggccagagtgggtcatctctgagttggcctgttacacatattccatggtagctgtgcccctgtatgacactttgggagcagaagccatcatatacgttatcaacaaggctgatatccctgtggtcatttgtgatacaccccaaaaagcaacaatgctaatagaaaatgtagagaagggccttacaccaggcctgaagatagtcatcatcatggatccctttgatgatgacctgacagaaagaggagagaagagtgggattgagatattatccctgtctgatgctgagaatctatgcaaagagaacttcaaaaagccagtgcctccaaacccagaaaacctaagtgttgtctgcttcaccagtggaactacaggtgaccccaaaggagctatgataacccatcaaaatattgtttcaaacatggctgctttcctcagattgttggaa

SEQ ID NO: 1611 - DNA, 570 bp, Cricetulus griseus
acggatggtggtagagagtgtggagaggatcttccggagtttccccaggggtgatgctggagaggtcacatccctgctgaagctgaataagaagctggcgcggagtgtgggccacatctttgagatggatgacaacgacggccagaaagaagaggagatccggaagtacagcatcatctatggccgcctggactccaagcggcgggagggcaagcagctcagcttgcatgagctgaccatcaacgaggctgctgcccagttctgcatgagggacaacacacttttacttcgaagggtagaactcttctcattgtcccgccaagtagcccgagagagcacctatctttcctccttgaagggatccaggcttcactctgaagagttaggaggcccaccactgaagaaactgaaacaagaggttggggaacagagtcataccgaaatccatcagcctcccccaggccccgagtcctatgcacccccataccgccccagcctataggaggacagcgccagtctgtctggggagagcctatatggccacttgcaggctgtggggtcgtgcccaag

SEQ ID NO: 1612 - DNA, 553 bp, Cricetulus griseus
taacaggtggtgtcactatatttgtggccttatatgattatgaagctagaactacagaagacctttcctttaagaagggtgaaagatttcaaataattaacaatacggaaggagactggtgggaagcaagatcaattgctaccggaaagaatggttatatccctagcaattatgtagcacctgcagattccattcaggcagaagaatggtattttggcaaaatgggtagaaaagatgctgaaagattacttctgaatcctgggaatcagcgaggtatattcttagtaagagaaagtgaaaccactaaaggtgcttattccctctcgattcgtgattgggatgaggtaaggggtgacaatgtgaagcattacaaaatcaggaaacttgacaatggtggatactacatcacaaccagagctcagtttgatactctgcagaaactggtgaagcactacacagaacatgctgatggtttatgccacaagttaacaactgtgtgtccaactgtgaaaccccagactcaaggtctagcaaaagacgcttgggaaatccc

SEQ ID NO: 1613 - DNA, 497 bp, Cricetulus griseus
cttttatgtagaacccaaggaatgccttccctgtcttattttagccaaaacaactggttacatgccttccttgcagtgagcactacaatggatgtgattgtcaatgtgaatagcttagagtactacaaagggtaagctaattgaatgccttgaaagtattatccactggtcatatggtaaactttttttcagtattatttatagttgcacttgattacagttctgaggcgctggagcatttgtgcacctcacctgccttggcaagcctatttttgtgacatggcagcacagatttaacactatgcgttaaaagcacttttttttttaatgtgtttaatcccttaaaaagaatgccaattaagtttcattacctgtcattgatttatctagtacctcagggttcattcctcttacctgaatatcttcttcaataactgtgttgacatctttggtttcccattgagtatacactactgaataaatgtaggagttttatg

SEQ ID NO: 1614 - DNA, 600 bp, Cricetulus griseus
ggaagataaatatttttgtgaaaattgccatcattatacagaagcagagcgaagtctcttatttgataaaatgccagaagttatcactattcatctgaagtgctttgctgctagtggcttggagtttgattgttatggtggtggactttccaagatcaacactcctttattgacgcctcttaaactgtcactagaagaatggagcacaaagccaactaatgacagctatggattatttgctgttgtgatgcacagtggcattaccattagtagtgggcactatactgcttctgttaaagtcactgaccttaacagtctagaactagataaagggaattttgtgtttgaccagttgtgtgaaataggtaagccagagccactgaatgaggaggaagcaagggggatggctgaaaattacgatgatgaagtgtcaattagagttggtggaaatgcccagccaagtaaagttttgaacaaaaaaaatgtagaagctgttggacttcttggaggacaaaagagcaaagcagattatgagctgttcaacaaagcgtccaatcctgataaggttgccgggacagcatttgttgaaaatagaaattc

SEQ ID NO: 1615 - DNA, 422 bp, Cricetulus griseus
caacacctcactcaacccgcaggagctgcagcggcagcggcagcttcggatgttggaagatttgggcttcaaggaccttaccctgcagccacggggccccctggagcccatccttcccaagcccagggcccaccaggagccggggcagccagacgcagcaccagagtcgccaccggtgggctggcagtgccctggctgtactttcatcaacaaacccacacggcctggctgtgagatgtgctgtcgtgcaaggccagagacctaccagatacctgcctcataccagcccgatgaggaagagcgagcacgcctggctggagaggagcaggcgctgcgccagtaccagcagcggaaacagcagcagcaggaggggaactacctgcagcacgtgcagctggagcagaggagcctggtgctgaata

SEQ ID NO: 1616 - DNA, 556 bp, Cricetulus griseus
ctttggaggagccaggtggagacccaggctcagctgcagaggcctttgcccacaactgcgacgacagtgcctccatctcttccttctccctcggtggggcagccagtagtgcctccctacgaggcacacggggtctaagccctgagcaggaagagacggcttctctggtgtccactggcactctggtccctgagggcatctacctaccccctcctgggtaccagcttattccagataaccagtgggagcagcttcaggtagaggggcggcagctgcagaaggacctggaaagtgtcagccgtgagcgggatgagctgcaagagggactgagacggagcaatgaggactgtgccaagcaaatgcaggtgctcctagcccaggtccagaactcagagcagctacttcgaactctacaagggactttgagccaggcgcaagaacgtgtgcagatgcagatggcagaactggccacttctcacaaatgcctgcacaacgaggttaaaagactaaatgaagaaaatcaagggctccgggctgagcagctgccatcctccac

SEQ ID NO: 1617 - DNA, 377 bp, Cricetulus griseus
aaaacctgaacaggctttcctctttctgctcagctgcaactaatgcaaactcaagagttgttatagtattgagatgtaaatgataataaaggaattattttaaggaatattagaaatgctagaatgtgctttacagtgcatttgtggaaatatcttctactttcatagtcacctaagaaatgactggtttctaatattaaaagatattgctctttatatatgaatgttttgtctagttctcattgcatcacaaaatgtcatttttttcctgtggaagtattctatctgaagctatataaatatgtaaccactctgctgtgtcttaatccaattggaaaagacatttttgttttgtttttatagtaacactgtgagac

SEQ ID NO: 1618 - DNA, 483 bp, Cricetulus griseus
agttggcttcaatcccaaaaaggacattcattttatgccctgctcagggctgacgggagcaaatctcaaagagcaatcagatttctgcccttggtacattggattaccatttattccatatctggataatttgccaaacgggaatagatcagttgatggaccaatcaggctgccaattgtcgataagtacaaggatatggggactgtggtcctgggaaagctggaatctggatctatttgtaaaggccagcagcttgtaatgatgccaaacaagcacaacgtggaagttcttggaatactttctgatgatgtagaaacggattctgtagctccaggtgagaacctcaaaatccgactgaaaggaattgaagaagaggagattcttccaggattcatcctttgtgatcttactaatctttgtcattctggacgcacatttgatgcccagatagtgattatagagcacaaatccatcatctgccc

SEQ ID NO: 1619 - DNA, 566 bp, Cricetulus griseus
  misc_feature (508)..(508): n is a, c, g, or t
ctgttccagtgtgtggcggccgtgttcattgctcagctgaatggggtgtccctggacttcgtgaagatcattaccatcctggtcacagctaccgcatccagcgtgggcgccgcaggcatccctgccggcggggtcctcacgcttgccatcatcttggaagccgtcagcctccctgtcaaagacatctccttgatcttggctgtggactggctagtggacaggtcctgtaccatcatcaatgtggaaggtgacgccttcggggccggactgcttcaaagttatgtggatcgaaccaagacgccgagctcggagcctgaactgatccaggtgaagaacgaaacgtctctgaatccactgcccctggccccagaggaggggaacccccttctcaagcagtaccgaggacccgccggggacgctgccgcgtgtgaaaaggagtctgtcatgtgaatagcaggaggggctttctgtgccctggtggcgtctcattggaagtggatatcatganggctggagaaactccaggggaggagtttacacagaccgggaaactaggggtccctgtc

SEQ ID NO: 1620 - DNA, 546 bp, Cricetulus griseus
ctatgtttgtggtggaagcttaggcaacaatgtttctgggagagtgcttagttcctgtgaagtctatgatcctgccacagagacatggactgagctgtgttcaatgattgagcccaggaagaatcatggactggtgtttgtaaaggacaagatatttgctgtgggcggccagaatggtttaggtggtctggacaatgtggaatattacgacattaaattaaatgagtggaagatggtgtccccgatgccgtggaggggtgtaacggtgaagtgtgcagcagttggctctatcatctatgtgctggcaggttttcaaggtgtaggtagattagggcacatccttgaatataacacagaaacggacaaatggattgccaattccaaagtccgtgctttcccagtcacaagttgtctaatttgtgttgttgatacttgtggagcaaatgaagagacccttgaaacatgattgagtggacctgactcatctgagactcaaaaatctggccaccaatggtttgttccattagtttggttgtgaagttctgg

SEQ ID NO: 1621 - DNA, 579 bp, Cricetulus griseus
tttccccgtacctagtctgcagttatggcgtcgctcaccgtgaaggcctatcttctgggcaaggaggaggcggcccgagagatccgccgcttcagcttctgctttagcccggagccggaggcggaggccgaggccgcggcgggtcctgggccgtgcgagaggctgctgtgtcgggtggcctcgctgttccccgccctgcggcctgggggcttccaggcgcactaccgcgatgaggatggggacttggttgccttttccagtgatgaggaactgacaatggccatgtcctatgtgaaagatgacatcttccgcatctacattaaagagaagaaggagtgccggcgggaccatcgcccaccgtgtgctcaggaggcatcccgaagcatggtgcaccccaatgtgatttgtgatggttgcaacgggcctgtggtgggaactcgctacaagtgcagtgtgtgcccagactacgacctgtgcagtgtctgcgaggggaagggcctacacagggagcacagcaagctcatctttcctaacccctttggccacctctctgatggcttctctcatggccgctggctt

SEQ ID NO: 1622 - DNA, 580 bp, Cricetulus griseus
  misc_feature (339)..(356): n is a, c, g, or t
  misc_feature (387)..(404): n is a, c, g, or t
catcgtgtccacacgtcgcgtcggtggcaggactcctgaattattccaaaactgaacaatttcaactgagctgaagtactctgccttcctagagtaccagtccagtttaggagagccagagcagatcattagccatcatggcaaaccttagctactggctgctggcactctttgtggctacgtggactgatgttggcctctgcaagaagcggccaaagcctggagggtggaacactggtggaagccgataccctgggcagggcagccctggaggcaaccgttacccacctcagggtggtggcacctgggggcaaccccatggtggtggatggggacagnnnnnnnnnnnnnnnnnnggacaacctcatggtggtggttggggtcagnnnnnnnnnnnnnnnnnnggtcaaggaggtggcacccacaatcagtggaacaagcccagtaagccaaaaaccaacatgaaacatgtggcaagtgcggctgcggctggggcggtggtggggggccttgggggctacatgctggggagcgccatgagcaggcccatgcttcattttggcaatgactgggaggaccg

SEQ ID NO: 1623 - DNA, 476 bp, Cricetulus griseus
  misc_feature (157)..(251): n is a, c, g, or t
agccgctactgctgaatccgcggaggctgaggtctggcacgaacgtgctggggaccccgagatcgtctgggtgaagcgggctgcggtgcacgggcgcaggcaggcggctctgagacccgtgaggaaccctaggagaagatgcgagccacccctctgnnnnnnnnnnnnnnnnnnnnnnnnnnnnnnnnnnnnnnnnnnnnnnnnnnnnnnnnnnnnnnnnnnnnnnnnnnnnnnnnnnnnnnnnnnnnnnncgaacctgggccaccctgcttcctgctgtccccgagtccacctcctgcctcagacttgtcacctgctgtggcccctgcaacccgactgggaccttatgtcctcttggaacaagagcaaggcagccacacctaccgggccctgcactgccccacaggcacacagtacacctgcaaggtgtacccagcctgtgaggcccgggaggtgctggcaccctatgcacggct

SEQ ID NO: 1624 - DNA, 578 bp, Cricetulus griseus
ctttgtatagcttttggagcctgttctggtacttgctctgtagataaggctggctttctcatagacttgagacaatgctgaaaactaaatgtgagcattaagcctgtatactctccctctttgatatctttaaacattgtctccttataacaggtcttctggactggaacatacagtataactcaggatgaatgcaaacctaaaatgatgcccctgtgtttgtcacctgactgctgagataacaggcatgtaccctcctcttgtattatctgcaggtgattagagaagttgaagaattgaaagcatttgtatacagcgaactcaataatttcttcactgagtcgatttttctgtgaaaaaaagtagggaacaaaattcagtcatatttttattatgttcaatcaatcatacacttttctatgccttaaaaataaagacttttttttctgtatcaaactctaaggggttgatttaaaatggtggagaaataaggaaagatgacaatttttagacacataatgtcatggtaaaattttagacctaaattctctttaaatgattatgttgaaataaaaatg

SEQ ID NO: 1625 - DNA, 312 bp, Cricetulus griseus
ctgtgaggaaaatatgtgcccttgatgaccacgtctgcatggcttttgcaggtttgacagctgatgctagggtagtaataaacagagcccgggtggagtgccagagccataagcttacagtggaggaccccgtcactgtggagtacataactcgcttcatagcaactctaaagcagaagtatacacagagcaatggacgaagaccttttggtatatcggccttaattgtaagctttgatgatgatggtatcccaagactgtatcagacagatccctctggtacttaccatgcttggaaggcaaatgcaatag

SEQ ID NO: 1626 - DNA, 557 bp, Cricetulus griseus
cagtgggaggcatccgtgcttctctgtataatgctgtcacaactgaagacgttgagaagctggctgccttcatgaagaattttttggagatgcatcagctgtgaacatgactagctatgctctgcctgtgagcagcacgcagagttcagaataacttctggttggctacaaaaacttaacagacatggatttttttcccccaaacacatgcttgttacagattctttttgaaagaataatgactaaacatccagggctctgcagggcggatgagactaccagcttatgaccaccttcattttgacttgacctggaagcagtttcaaagctttcctgttgcttttctaacgaatccagcctggcatgtctctgcccctgtctctaggtggattgcagtcctagccttggactttgttctgctgattccatttagttattttttgggttcacaggagcataccccaaggaggttggggtaccatgttctggatctgacagcagtgagtttgctgggttctgcagctattggttaaagtcaacagtgactcttaagcatt

SEQ ID NO: 1627 - DNA, 554 bp, Cricetulus griseus
gaggcgaccaagccacctccagtcccagatatggccagtacaccataatccaagaaaactccaccaaagttacagagaggcctccctttaatcgatcaagttcccaggattctttggatgacgttttgatggaagactattggacggaactagaaaacatcaagaggtctaatgaaaatcgccaagaaagtcaagaggccgttgttgtcaaagagcctgatgagggagagctggaagaagagtggctcaaggaggctggcttgtccaatctctttggagaatctcctgatgacccccaagaaagcattgcgtttttagccacactgacccggactcaagcggcagccgttcagaaacgggtagaaacggtctcccagaccttgaggaagaaaaacaaacagcaccacattcctgacgtcagagacatatttgctcaacagagagaagcacaagaaaaatctccaggtggctcagaatcaccgtcagccagaacgaaggaaaacaaatgccaaggaaaagatgaccaggcatcaagtggggctgttgataacaag

SEQ ID NO: 1628 - DNA, 487 bp, Cricetulus griseus
gcagcttagagcaggaagctgagtctgtgctggcacagcagggtgactggagtgtcaagggtccaggaggccgagctgcacaggtcagccacccagaccacaaacctttggaatcagactggaacagctgggaagctgagggctcctgggaccagggctggcaggagcccagttctgtggagccacctccagaaggcacccggctagcaagcgaatataactggggtggtgcagagtccagtgacaagggtgacccctttgctgccctgtctgttcgtcccagcacccagcccaggccagacccagacttctggggtgaagacaactgggaaggcttggaggctgagagcagacaggtgaaggcagagctggcacggaaaaagcgtgaggaacggaggaaggaaatggaagccaagcgggcagagaaaaaggccaccaaggggcccatgaagctgggagcccggaaactggactgacaaccctaccc

SEQ ID NO: 1629 - DNA, 542 bp, Cricetulus griseus
ggcccggaaacagaagggtgcagagactgaactggtcaaattcttgcctgcagttggtgatgagaatttcaagaggctgtccagtcgtgctcggaagagggcagccaagaggaggtccgggtccgttgaagtccctaagccaaataagtctccagggatcaaaacgttgcctggagagttagcaaaaggagctgtccaggctcggggtaagaagcgcccagcaccaacttctaacagtgatggggatgaggaggaagactctgaggaagatggcgtggcaaaccagggggacctgtggggctctgaggacagtgatgctgacatggtggatgactatggagctgactcagactcagaggatgaggaggaaaagttgttgcccattgaaagagctgctctgaagcagaaggcccgggaagctgctgctgggggccagtggagtgaagaggagactgatgaggaggaagatggtccccctgcgccccgtccctcaaaggatgatgaggcggaggggggtttgcagattaatgtggacgatgagg

SEQ ID NO: 1630 - DNA, 444 bp, Cricetulus griseus
gcagccgctgattcaggaacatttggagctggaccatgacccattctccatttaccctctttttacagagactgattccagccagagacagcaccaatctacttcagagaagatgatgggcatcaaaggagctgcagagaagatgataggcaccaaagaaactccacatgcagtttaatttatttgtggcaaagggaagaagtctcatcatcaagtacagtgcatggacactgggaaacatgcatgtctaccagtcccttgggagacactgtgtaattcctcacagatcttcatgtcacagaagccaatggagatgaatttctattacctattgagaagggtataaagtagtcacttttctagaaggtgaccagcgtcaaacatctctggattggggaattcctttttgtcatgcagcactgctgacagtgatgttaaaatggt

SEQ ID NO: 1631 - DNA, 568 bp, Cricetulus griseus
ctactcgattcaaggacaacacaccatttctccgctcgatctggccaagctgaaccaggtggcaagacaacagtctcactttgccatgatgcacggcgggacgggattcgccggaattgactccagctctccagaggtgaaaggctattgggcaagtttggatgcatctactcaaaccacccatgaactcaccattccaaataacttaatcggctgtataatcgggcgccaaggcgccaacatcaatgagatccgccagatgtccggggcccagatcaaaattgccaacccagtggaaggctcttctggaaggcaggtcactatcaccggctcggctgccagtatcagcctggcccagtatctcatcaatgccaggctttcctctgagaagggcatggggtgcagctagaacagtgtaggttcgctcgtaacccccttctgctgttttcccatgatccaactgtgtaatttctggtcagtgattccaggttttaaataatttgtaagtgttcagtttctacactttatcatctgctaagaatttaaaaagaaaatcacattctctgtt

SEQ ID NO: 1632 - DNA, 183 bp, Cricetulus griseus
gctgacggcttcctgaggagacggccctcgatggggcatcctggcatgcattatgcaccaatgggaatgcaccctatgggtcagagagcaaacatgcctcctgtacctcatggaatgatgccacagatgatgccccctatgggagggcctccaatgggacaaatgcctggaatgatgtcttca

SEQ ID NO: 1633 - DNA, 542 bp, Cricetulus griseus
  misc_feature (210)..(239): n is a, c, g, or t
  misc_feature (297)..(439): n is a, c, g, or t
tgattcatgggactttaaatgaattctgtgggtgaaagcaccagagttactagtgtccattttcatccaagacccttcttctctaacgttcttggtcctgttgaaacatttcagtatctacaaatactgcaatgttactacccaagagaaaagccattgtgtgtatgctggtcaccatgatcagtgtggtaccatttcctttttttgtcnnnnnnnnnnnnnnnnnnnnnnnnnnnnnnataaactatcacacccttccagccaccatttgtctttatttctagaactagaaattcnnnnnnnnnnnnnnnnnnnnnnnnnnnnnnnnnnnnnnnnnnnnnnnnnnnnnnnnnnnnnnnnnnnnnnnnnnnnnnnnnnnnnnnnnnnnnnnnnnnnnnnnnnnnnnnnnnnnnnnnnnnnnnnnnnnnnnnnnnnnnnnttatatctgaaggaacagttcacacccaggatagggaaacacacttaaaaatgaaacatacatcaaagcacattggctagaacagtgcagcaattagaatttc

SEQ ID NO: 1634 - DNA, 311 bp, Cricetulus griseus
  misc_feature (14)..(57): n is a, c, g, or t
aaggtcgagacctnnnnnnnnnnnnnnnnnnnnnnnnnnnnnnnnnnnnnnnnnnnnacaactcagaacaactgaacgggactcagcgggttctcctagacaacgtcctatcggaagagcagtgccacgagctacacagtgtggccagtggaatcatgctggttggtgatggataccgagggaaaacatcgccccatacaaccaatgaaaagtttgaaggagcaactgtcttgaaagcactaaaatttggctatgaaggccgagtgccactaaagagtgcacgcttgttctatgacatcagcgagaaagct

SEQ ID NO: 1635 - DNA, 442 bp, Cricetulus griseus
  misc_feature (89)..(108): n is a, c, g, or t
aaaccctgctcctggtggctctgggagtgtggctccagagtttgaccgcctcccaagaggggtggccgcagcatacgggggaagagatnnnnnnnnnnnnnnnnnnnnatttgccctaaggacccctgatgacacggctgaggaggggggccacctcattcccggaatagcagaatctgtgtctaactgccacttcaaccacagcagcaagaccttcgttgtgatccatggctggacggtgacaggaatgtatgagagttgggtgcccaaacttgtggctgccctgtacaagatagaacctgactccaacgtcattgtggtggactggctgtatcgggcccagcaacactatccattgtcggctggctacaccaagctggtgggaaatgatgtggccaggttcatcaactggatggaggaagagtttaactaccccctggac

SEQ ID NO: 1636 - DNA, 553 bp, Cricetulus griseus
  misc_feature (273)..(273): n is a, c, g, or t
gcagcaagccatgcaatctctgaaggagactggcttcattaattactatggcatgcaaagatttggaaccactgctgtccctacataccaagtgggaagagctattctacagaattcctggacagaagtcatggatttaatactgaaaccgcgtgctggagctgaaaaggggtgcttggtgaaatgcagagaagaatgggccaagaccaaagatccagcctctgctctccgaaaactacctgtcaaaaggtgtgtggaagggcagctgcttcnaggactttcaaaatatggaatgaagaatatagtctctgcatttggcataatcccaagaaataatcgattaatgtatatccatagttatcaaagctatgtgtggaataccatggtgagcaaaaggatagaagactatgggctgaaacctgtgcctggggaccttgttctcaaaggagccacagctacctatattgaggaggaagatgttaataattactccattcatgatgtggtgatgcccctgcctgggtttgatgttatctaccccaaacataaaatt

SEQ ID NO: 1637 - DNA, 440 bp, Cricetulus griseus
  misc_feature (1)..(18): n is a, c, g, or t
nnnnnnnnnnnnnnnnnntatgcttctgtggtctttgatagagttgaagacagatagttatggttataattttcttcacttattataaaaaataagttacccttctttttatttagacaaaaaagagagatgatgggggaaatacttctgtgtatgtttataaataaagtgcttgcttggccaatgagacagcaggttaggctggactaggagtcaaagaggattctgggaaatgtagtagagaagtgatgttccagacaggaagtgacatagcaaggagactcatatttaagaagaggaaaaaggaaatgttgctctctttcccctcggctcctgctccagcgggaagatgtgatccaccagctaggagggacgccaataaggcgtgcgataagataaggcttataaaatatatagatgtatgatgatggatactgagc

SEQ ID NO: 1638 - DNA, 584 bp, Cricetulus griseus
ccttcatttgcatatttagaaaatgggcagacctttactactatggccatcaaaaccagtcccaagcatctggagctgtctgkgcagatgtatgcccaagcagccctggatggagactcccagggatttttcaacctggctctactgatagaggaaggtgctgccgtctcacaccacattctggagtkcctggaaattgacccatcactccatcccagtaacgcctccattctccgggagctgtatgaaaggtgctggagcctsagtaacgaggagtcgcttawcccctgcgccctggcctggctttaccttcacctgcggcttctctggagtgctgttctgcactctgccctgatctacttccttggaaccttcttgctgtccgtakkgatcgcctggatggtgctctatttccagwgtgtctcasccagtggctcctstccascaccatgmctgggtcgtggcagaccccacctcatccgccccaagtccakctgtgcctccarctgsagatgcctccgaccatgacccacccatgatggctaacaaccctgagcctcgagggtgaacttgcacgtccattc

SEQ ID NO: 1639 - DNA, 548 bp, Cricetulus griseus
  misc_feature (544)..(544): n is a, c, g, or t
gagagcggtgtgtggagccttcggcttgggagkaaggcgctgtccgaacgaacargacccgagcggcagctgtgctcccgccttggaagtggttcaatcatggttgaaattaaraagatctgttgcattggtgcaggctatgttggtgggcccacatgcagkgtsrttgctcatatgtgccctgaaatcagggtaacagttgttgatgtcaatgagtcaagaatcaatgcatggaattctccaacccttcctatttatgagcctggattaaargaagtggtakaatcctgtcgagggaaaaatctgtttttttctaccaatattgatgatgccatcagagaagctgacctagtatttatttctgtaaacacaccaacaaaaacctatgggatggrgaaaggccgggcarmawatctgaaatatattgaagcttgtgctcgacgcatwgtgcaaaactcawatggggtcaaaatcgtgactgagaaaagcacagtccctgtgcgggcagcatagagcatccgccgtttatttgatgccaacacanagcc

SEQ ID NO: 1640 - DNA, 595 bp, Cricetulus griseus
  misc_feature (93)..(139): n is a, c, g, or t
  misc_feature (167)..(213): n is a, c, g, or t
  misc_feature (246)..(298): n is a, c, g, or t
  misc_feature (328)..(374): n is a, c, g, or t
  misc_feature (452)..(543): n is a, c, g, or t
tagttccaatcctaattgcaatagctttccttacattagtagaacgaaaaatcctaggctacatacaactacgaaaaggcccaaacatcgtcnnnnnnnnnnnnnnnnnnnnnnnnnnnnnnnnnnnnnnnnnnnnnnntattaaagaacctttacgccccctagcnnnnnnnnnnnnnnnnnnnnnnnnnnnnnnnnnnnnnnnnnnnnnnntarcgttcagcctatgagttcctattccaatannnnnnnnnnnnnnnnnnnnnnnnnnnnnnnnnnnnnnnnnnnnnnnnnnnnncaagcctttctgtatattcaatcttatgannnnnnnnnnnnnnnnnnnnnnnnnnnnnnnnnnnnnnnnnnnnnnnagctgkagcacaaactatttcatatgaagtaactatagcaatcattttactatcacgcctacttataaggggctcttnnnnnnnnnnnnnnnnnnnnnnnnnnnnnnnnnnnnnnnnnnnnnnnnnnnnnnnnnnnnnnnnnnnnnnnnnnnnnnnnnnnnnnnnnnnngcagaaacaaatcgagctcctttcgacctcactgaaggagaatctgaactag

SEQ ID NO: 1641 - DNA, 835 bp, Cricetulus griseus
  misc_feature (412)..(460): n is a, c, g, or t
  misc_feature (517)..(563): n is a, c, g, or t
gcagctgcagatgaggaagatgaggatgaggaggaaggggaagtggtggaagaccgtgattactactatgactcttttaaaggagatgactacaatgaggagaacccaactgaacccagcagtgatggcgctatttcagacaaggaaattgctcacgatgttaaagctgtctgctcccaggaggcgatgacggggccctgccgggctgtgatgcctcgttggtacttcgacctctccaagggaaagtgcgtacgctttatatatggcggctgcggcggcaacaggaacaattttgagtctgaggattattgtatggctgtgtgtaaaacgatgattcctcccactcctctgccaaccaatgatgttgatgtgtattttgagacctcagcggatgataatgagcacgcccgcnnnnnnnnnnnnnnnnnnnnnnnnnnnnnnnnnnnnnnnnnnnnnnnnnacagggtaaagaaggagtgggaagaggcagakcttcaagccaagaaccttcccaaannnnnnnnnnnnnnnnnnnnnnnnnnnnnnnnnnnnnnnnnnnnnnntttagagaaggaagcagccagtgagaagcagcagcttgtggaaacccacttggcccgagtggaagccatgctgaatgaacgccggcggatagctctggaaaattacctagctgccctgcagtctgacccaccacggccgcatcgcattctgcaggctctgcgccgttacgtgcgtgctgagaataaagaccgcctgcacaccattcgtcattaccagcatgtgttggctgttgacccagaaaaggctgcccagatgaaatcccaggtgatga

SEQ ID NO: 1642 - DNA, 538 bp, Cricetulus griseus
atcctgtcctttggtttataatctagttgtagagataagaaacatacaaacaacgacaacaaaaaccaaaaaccaaaccctaagattatttggagcatgcattctgtcagatgtgtgccttcagagcatggaggargcaaaggctttgggggctggctacaggagtcagttaaaaacttcagggaggagagagccattgaaagggagtccttattggagtagggaagtcagtgcattccatgagaccagacttgagggtagatgatgtgagaaaggcattaatttaagaacccttatgatagtcaaaacagccttcttatagtggagagtgtggagagtagggttaaatctgtaaaaccgyatgaagcccattgcagaaagcttgttgaatgtatttttaactakgaaagagttggggtcaatataaaagtcctcccacactgtgtcataaagaatggtgtagcataatggctcctttctaactctggtggtgggcatttgacaatacatatcattaagccttaacatatggaaacct

SEQ ID NO: 1643 - DNA, 581 bp, Cricetulus griseus
atgctctctctctcaagatgcattaaagctttactgcagamgkrkscgagtgtcctgtgttgttcttgctggcgagacgatcgcgcgggacatctggtgccgaaacccgggaacttgttaacatcgccggcactgcggagacccctcggacggggcggattcagaactgcagggtggatgaagagaatcccctgtggatcccggaaagactcaccctaagagccccttcggaccctcaaaagtcggaactccaccctctccccgggagttgagagccgctattatccagattaactccatgcaccttgacctgtccttgacggagggattgtcatcatggatcgcttcagctgtctcctattttaaggaatgggtgggggtgggacatttggcacaattctctgcagtggtgtggtgtttatgcttgggactgtgtgtagactcaaaacccaaacaaaawaagataaggtrgtggttgcacagacactcgctgccctagagaatggaatctcccccggcatttggctaagcatgttgaggcaataggtcgccgactgctcagctcctgcacctccggaggc

SEQ ID NO: 1644 - DNA, 561 bp, Cricetulus griseus
  misc_feature (143)..(157): n is a, c, g, or t
  misc_feature (540)..(555): n is a, c, g, or t
ggaagaagctgactaaakaaccagccaaagccttaaattgtgcaaaacatactgttgctatgatgtaactgcatttgacctaaccactgcgaaaattcattccgctgtaacgtttttcacatatttaaagcagaagcacgtcnnnnnnnnnnnnnnntgcataaggtttttgtagtgtgatgtcttaatcatagtctaccatcaaatactttaggagtatccttaatgttkagatagaatattagcagcatgcaataattacatcctaagttctcaagcagaggcagtctattgcaaggaccttctttgctgccagttaccataggctgttttaagttagaaaactgaatagcaacactgaatactgtagagatgcactttgctcagtaatacttgagttgttgcaatatttgattatccatttggttgttacagaaaaattcttaactgtaattgatggttgttgccgtaatagtatattgcctgtatttctacctctagtaatgggctttatgtgctagattttaatatccttgagcnnnnnnnnnnnnnnnngtcttt

SEQ ID NO: 1645 - DNA, 389 bp, Cricetulus griseus
cccacgcgtccggggacgcctgggttcccgaccgcttgcttcggcgattgtcakggtactgataaccatggcatccctgtggctgctcagagttcccttcctgtgtgccctgctctggacctcttgtactctcakktwcyakggcccatgakcctggggccggcagccatcacagcaktgtgggcctggtacaagatcacagtgcatgaccaasagcatatcatggaacatctasaaggtgycrtcgacaaaccagagacagagatgtcccctcaagaactgcagctccactatttcaaaatgcatgattatgatggcaacgatttgcttgatggcttagaactgtccacggccatcactcatgtccataaggaggaggggagtgatca

SEQ ID NO: 1646 - DNA, 602 bp, Cricetulus griseus
cacaggactgctgagctacctggtgttcaacatcatccccaccctggctgacatcattattggcatcatctacttcagcatgttcttcaatgcctggtttggcctcattgtgttcctgtgcatgagtctttacctcatcctgactattgtggtcacggasyggagakccaastttcsccgygatatgawcacacagtgaaaatgtcaccaakgcacgagcagtggactcgctgctcaactttgakacggtgaaatactacaatgctgagggttatgaagtagaccgctacagagaggccatcgtcaagtatcagggtttggagtggaagtcaaatgcttcactggttgtattgaatcagacccagaacttggtgattgggcttgggctcctggctggctccttactttgtgcatacttcgtcagtgagcagaagctgcaggttggggactttgtgctttttggcacttacatcactcaactgtacatgcctctcaactggtttggcacctactacaggatgatccagactaatttcattgacatggagaacatgtttgacttgctgaaagaggaaacggaagtaaaggatgttcctggagca

SEQ ID NO: 1647 - DNA, 906 bp, Cricetulus griseus
agccctggacatttctagagaaacctacttggccattctgatggaccggtcccacaatggccctgtgatagtgggcagccctcawggcggcgttgatattgaagaagtggcagcttccaatccagaactcatctttaargagcaggatkgacatttttgaaggaataaatgatagccaggcccagcggatggcagaaaatctgggcttcctcgggcctttaaaaaaccaggcagccgaccagattaaaaagctgtatcatctcttcctgaagattgatgcgactcargtggaagtgaacccctttggkgagactgcwgaaggacaagttgtctgttttgatgccaagataaactttgatgacaatgctgagttccgacaaaaggacatatttgctatggacgacaaatsagagaatgagcccattgaaaatgaagctgycargtaccatcttaagtacatcggactagacrggaacattgyctgcttcgkkaatggcgctggattagccmtggctrcttrtsacataattktsctgaatggagggaagccagctaacttyytkraccytggargtggkgtaaaggaagcccaagtctatcaagcattcaaactgatcacatctgatcccaaggtggaagccatcctcgtcaatatatttggtgggattgtcaactgtgccatcattgccaatgggatcaccaaagcctgccgggagttagaactcaaggtgccactagtagtccggcttgaaggaactaatgtccaagaggctcagaaaatcctcagaaacagtggcctccctatcacatcagctgcggacctggaggatgctgccaagatagctgttgccagtgtggcaaagaagtgatgtgatggcttcccccggctcccgtgaagataggcac

SEQ ID NO: 1648 - DNA, 1503 bp, Cricetulus griseus
  misc_feature (32)..(38): n is a, c, g, or t
  misc_feature (46)..(60): n is a, c, g, or t
  misc_feature (62)..(78): n is a, c, g, or t
  misc_feature (112)..(141): n is a, c, g, or t
  misc_feature (208)..(209): n is a, c, g, or t
  misc_feature (297)..(308): n is a, c, g, or t
  misc_feature (655)..(655): n is a, c, g, or t
  misc_feature (1080)..(1107): n is a, c, g, or t
  misc_feature (1451)..(1465): n is a, c, g, or t
tgtagtagtgtcaaacacttacggaacaaacnnnnnnngcgtgggnnnnnnnnnnnnnnngnnnnnnnnnnnnnnnnntctctsatacycctacctctaacctggttatcannnnnnnnnnnnnnnnnnnnnnnnnnnnnnagacacagtywcttaatcaatactttarctatagcaactctatgacgaaggaacgaarcavgykttnnactctcccacacattktatatygatgcactatcttgatcaykaatyatattacttatctaacttctaccactgatactactagctatnnnnnnnnnnnntaaaaaagaaaccgactacaacraaaaactttatrttkctatactaatyattctacaaactctkctaatsccaacattytcagcaaacgagstyatactattttatattktatwhgargccacacttmttccaactcttgtraycrtywcacgatgaggaamccaaacmgagsgatkaagbgcrggcctttactttctstyttacacactaskrggmkmratsccattactaatkgckktaakttscatcaactctysactargrtsattaaatacatyacttckaactytatckmmttmkrkatdvaaccaayyatggdstawccatattttatkactakcatgcnkgatasccywtdtwatmaaartacctktatacsgagkacmtvyatgactbccwaaagcwcatgkrvaarccsmtwtkgscgggkstwtwattctagsggstwttytmytaaaattrrgrggbkacggratrmtacggctwtmggdaattctagathcactaacaaaatctrtggmttatccatttattatactaycactatkaggaatwatcrtdskdgskrkaatmtgcctmmrackgggaggcctawamtcayttatkgmstactmatmastsastcacatggyaytagttattgcagctattataattcaaacaccatgaagttttataggagcctcagcactaataawcgywcawggbyttacatcttmtmtactmtywtgtsttgmtaatactaactatgaacgtatscacagccgaacnnnnnnnnnnnnnnnnnnnnnnnnnnnngctytycccctyawagccctattttgattcttaggaagcctwactaacctarcccttccaccatcaatcaatytaattggagaattactaayctcaawttyactayyctcatgatcwaattttaccatcttattagtaggaactaacatcctaattacagccctatattcactatatatactaatwactwctcaacgaggtaagttaacaccacatataattaatctacaaccatcacacacacgagaacttaccttaataatactccacattacaccactttcacttttaatgattaacccaaaatttatcataggcaatacattataaaaaaaaaaagcttnnnnnnnnnnnnnnncgcccccccgcggggggcctccacttttggttccctta

SEQ ID NO: 1649 - DNA, 578 bp, Cricetulus griseus
tgcgtggagctcctggatccgtgctacggatctgactgcgaatatcagtgccagccagtgagtcccacagagtacatttgcatctgtgctgagggcttcgcacccaaacccggggaaccgcacaggtgtgaaatgttctgcaatgaaagttcatgcccggctgactgtgaccctaacactcctgatttttgccattgccctgagggctttattctggacgaaggtcacatatgcgtggacattgacgagtgcagtcaagaggaatgctcccgcaatgagtgtcgaaatcttcccggctcctatgagtgcatctgtgggcctgacacagctcttgctggccaggttagcaaggactgtgatcccacccctgttattgaatacaacgaggaccatggctctggggagcccccagtcagtccaacaccaggctctcccacaggtccgccctcagcaaagccagtgcattctggcgttctcattggcatctccatcgccagcctgtccctggtgggggcgcttttggcgcttctatgtcacctgcgcaagaacaaggagcccgacgtgcacagctatagtac

SEQ ID NO: 1650 - DNA, 344 bp, Cricetulus griseus
  misc_feature (32)..(48): n is a, c, g, or t
gttgggtgtgtatgtaatatagactgcagtgnnnnnnnnnnnnnnnnngtgtgtgcttctgacgggagttcctacaacaatccctgttttgttcgggaagcatcttgtataaagcaagaacagattgacataagacatcttggccactgcacagacacagatgatacaagtttattgggaaagaaagatgatgggctgcaatatcgaccggatgagaaagatgctggtgatcaaagggaagatgtttatattggaagccacatgccttgtgctgaaaacctcaatgggtactgcatccatgggaagtgtgaattcatctactctactcacaaagcttcttgtag

SEQ ID NO: 1651 - DNA, 459 bp, Cricetulus griseus
  misc_feature (94)..(108): n is a, c, g, or t
  misc_feature (405)..(421): n is a, c, g, or t
ggtgattcctcttcccttggccatacgtgaaagagagctctgcagccataatcctaatagcagctggctgccatagctagaagcccatgggaannnnnnnnnnnnnnntgtcaactacagggccatgatctcttgtgcactcaggcaggctctgcatcattcaaggggctgtgctctggttcttgcaggcacagtctccccgctaccccagctctcttagaaatggaccaggaaggaggtcacagtgaccagtaccatggatctcccacccacacatctctgttcacctccatagttcctgagactgtcatcaccatcccctctttatcccatgtagccattgtccagaacaagcacccctccctattctctgccacctgtgtggcaagaccactccatcttccnnnnnnnnnnnnnnnnnggctgcatgctgctatccctcctatgtggaccatcctc

SEQ ID NO: 1652 - DNA, 581 bp, Cricetulus griseus
  misc_feature (8)..(8): n is a, c, g, or t
  misc_feature (69)..(69): n is a, c, g, or t
  misc_feature (155)..(169): n is a, c, g, or t
  misc_feature (465)..(465): n is a, c, g, or t
  misc_feature (473)..(473): n is a, c, g, or t
  misc_feature (508)..(508): n is a, c, g, or t
  misc_feature (574)..(574): n is a, c, g, or t
  misc_feature (580)..(580): n is a, c, g, or t
cgcagaangcggcggtagcgggtggcttgtggtgcagctttaccacagaaggaaccgcgcaggccttantgtgagtggtcactgtagatcccgggaacctggtggccttagtccttcaggtggatcagcgtgcgacatgggaaagaaaaccaagnnnnnnnnnnnnnnntcttcttccgaggatgaggaggagtatgtggtggaaaaggtgttagacagacgcatggttaaggggcaagtggagtatctgttgaagtggaaaggcttttctgaggagcacaatacttgggaacctgagaagaacttggattgtcctgaactaatttctgagtttatgaaaaagtataagaagatgaaggagggtgaaaacaacaagcccagggagaagtcagaaggaaacaagaggaaatccagtttctctaatagtgctgatgatataaaatctaaaaaaaagagagagcagancaatgatntcgctcgaggctttgagagaggactggaaccaganaagatcatttggggcaacagattcctgtggtgacttaatgtttcttaatgaaatggaaagacacanatgaanc

SEQ ID NO: 1653 - DNA, 855 bp, Cricetulus griseus
gcctcccagcgccgagcggagctgcggaggagaaagctgctcatgaactccgagcagcgcatcaaccgcatcatgggctttcacaggcccgggagcggcgcggaagaagaaaatcaaacaaaatcaaagccccaggacagtgacaaactgaactcccttggtgttccttcagtttcaaagagggtagtgctcggtgattcagtcagcggtggaacatctgaccagcccagtggtgtggcagaagttaagggtacccagctgggagacaaattggactcattcattcagccaccagagtgcagtagtaacgatggtgtggagctccggcagcggagcagaggtgacccgacagcaggctcggcccagagggcttctcaccatggcctagaacagtacctgtccagatttgaggaagcgatgaaactgcgcaagcagctgatcagtgagaagcccagccaggaagatggaagtacaacagaggaattcgactcttttcgaatattccgattggtggggtgtgctcttcttgctcttggcgtcagagctttcgtctgcaaatatttgtctatattcgctccatttcttactttgcaacttgcgtacatgggactatacaaatattttcccaagggtgagaagaagataaagaccacagtgctgacagctgcgctgttgctatctggaattcctgctgaagtgataaatcggtccatggagacctatagcaaaatgggtgaagtcttcactgatctctgtgtctactttttcacttttattttttgtcatgaactgcttgattattggggttcagaagtaccctgaaacctgaagaactgagaacaagtttacaaagtg

SEQ ID NO: 1654 - DNA, 603 bp, Cricetulus griseus
  misc_feature (508)..(536): n is a, c, g, or t
gcaagagagagagcaagccaccaccacagcagcctggcccatcaattctgtgacatggatctccggaaggtgctgtcccgggtggttctgttcctgctttttctctatctgtcaccgctgggaagtcactcccaccctctgggcagtcccagccagtctccggaacaatccaagatgcagactctgctagacctgctgagggaaaaggcagaggcggtggctcgggggcagctcctgaaggaccaagacgtcatcacaaaagcacctctccaaagcacccttgggtctcaagacagcaccctccatgtcctgcagaaacttcgaaactccaagaagatgcataattcgggctgctttgggcagaggatagacagaatcggctcattcagtcgtctgggctgcaatgtgctgaagcggtattaggatgagctcccagctgcagacaccggctcctgactccacctggggctccttccccaatgctgggacccccttttgaagtgatccnnnnnnnnnnnnnnnnnnnnnnnnnnnnntggttgttttctacaagactgtttcttacctttgagcacagacttttcatggtgtaataaacacagc

SEQ ID NO: 1655 - DNA, 3298 bp, Cricetulus griseus
  misc_feature (1820)..(1842): n is a, c, g, or t
  misc_feature (1932)..(1959): n is a, c, g, or t
  misc_feature (3238)..(3273): n is a, c, g, or t
cgtgactggtcggccgtgtgggtgctgcagccaacgaacccggcggcggcggcggcaagggaagcgagcgggaccccgggctccgaggaactgcggcccgcgccgccgcgtcacgcaccctctgggcgccgcgagacacacataacgataatagatttgcattgcattttgggattcatctacacttaaaatgccacctgcaattggaggaccagttggatatacccccccagatggaggctgggggtgggcagtggtagttggagctttcatttctattggcttctcttatgcatttcccaaatccatcaccgtcttctttaaagaaattgaaggtatattcaatgctactaccagtgaagtgtcatggatatcatccatcatgttggctgtcatgtatgctggaggtcctatcagcagtgtcctggtgaataaatatggcagccgtccagtaatgatcgctggtggatgcttgtctggttgtggcttgattgcagcttctttctgtaacacagtgcaggaactttacttgtgcatcggtgtcattggaggtcttgggcttgctttcaacttgaacccagctctgaccatgattggcaaatatttctacaagaagcgaccattggccaatgggctggccatggcaggcagccctgtgttcctctctaccctggctccacttaatcaggctttctttggtatttttggctggagaggaagcttcctaattcttggtggcctcctactaaactgttgtgtagctggatccctgatgcggccaatagggcctaagccaggcaagatagaaaaactaaagtccaaagaatctcttcaggaagctggaaaatctgaggcaaacacagatctcatgggaggaagccccaaaggagaaaagcgatcagtcttacagacaattaataagttcctggacctgtccctgtttgcccacagaggctttttgctgtacctgtctgggaatgtagtcatgttttttggactgtttacccctttggtctttcttagtaattatggtaagagtcagcattactccagtgagaagtcagccttcctcctttccattctggcctttgttgatatggtagccagaccttccatgggacttgcagccaacaccaagtggatcagacctcggatccagtacttctttgctgcttctgtggttgccaatggagtgtgccatttgctagcacctttgtctacaagctacatcgggttctgtatctacgcgggagtctttggatttgcctktggttggctcagctccgtattatttgaaacattgatggaccttgttggtccccagaggttctccagtgctgtgggcttggtgaccattgtggaatgctgtcctgtccttctagggccaccacttttaggccgccttaatgacatgtatggagactacaaatacacgtactgggcttgtggcgtgatcctcatcattgcaggtatctatctcttcattggcatgggcatcaattatcgacttgtggccaaagaacagaaagcagaagagaagcagaaacaggaagaaggtaaagaggacgacaccagcactgatgttgatgagaaaccaaaggaattaacaaaagcaacagagtccccgcagcagaatagctccggagaccccgcagaagaggagagtcctgtctgaactgaagcatgaatagagcagtgtgtgacccaagacatctgaaaccattctgctggcctctagtctaccagtggtgctcaatgcagacagtggacatttgtgtggaaaacctaccaggtgttcattggtggaattttgttttgtnnnnnnnnnnnnnnnnnnnnnnncactccttaccaatgccagagtttaaaatttactatgctttaggtagggattggttggcaaaggatatgggaaagaagtgtagggatttnnnnnnnnnnnnnnnnnnnnnnnnnnnncttagcttttaacagtgtcatgaagattatawtrwrwgcctyawgttkwarttttagaactctttagagagccttaacttttaaaatcattctgctgaattcatctattwkwaatgttttaaaaggaaaaataacaactaacttgcttgaggtaactctaaccttaatcttgttttgttgttgtttgtaatgctttgtcagagattgttactggaacatttatggataaaaatactagttaaaagttggaggtttataaaatactgactaaagtatttttctagcatcatagttgcctckagtaggtgcctgctargtatatmtttaasaaatttaaagcatgaaattctggaaacatcttggctgttatagccacagtctgtctgtctgtcatctgctggrgacttctcaratgcttactgcaagcctagtgctasaatgttgtcactaaattgctaccttgctcctcttcagagacattgagtggttacaggtcattgccatttttgaaatctactgcaaaaaagttagtattaaaatctacaaaacttttaacacagtctgatttaatatagacaggtatttcaggcatctgctaaattcaktttarttttccaaaaccctasttatggtatgaaamtcttgyaatctttgagtatgtgtgggttttggggggcctggtggttctgakgattgaacccagggccacaagcatgctaagcacatgctgtaccactgagccacatcccaccagcaccctggaatcctccttaaccccgagacctttgctctttgatttttgatagttccatttatatcctagtttagagctgtatgcgagatatcagtatggactaaatgtgtgtgctagttttgttttttacattgtttttcagtatttgcaaaaccaagagggccagagtttggccccggggaagccaataaagataaaatagggagggagtttgctgagttcacttgatttcagtaagtacccacctccctgccacatacaccaaggcttaaagagaaacttatatcatgcttagaattattggacatagccttacctctacaaaccttagctttcgtgacccttttcacttacctgaaatatagaaaatgggttcaatgtaaggataggaggaaggatgggcaggattggaattgtagtattttttaaaaccaatatcttctaaatagagacagaaaagatatatgacactaaattgtactcaatgcatctaaaataccattgtaattgacggggtgaaaatannnnnnnnnnnnnnnnnnnnnnnnnnnnnnnnnnnnaataaaacatttattttatttttag

SEQ ID NO: 1656 - DNA, 761 bp, Cricetulus griseus
ctgcacccaagattctttcctgtcacctcagctcggagtccgtgtctccgtctacgcagcagccatgccgccrtacaccattgtctacttcccagttcgaggrcgctgtgaggccatgcgcmtrctgctggctgaccagggccagagctggaaggaggargtgrttacygkagawwcctggrkgaaaggytcgctcaagtccacctgtttrtatgggcagctccchaaatttgaggatggagacctcaycctgtaccaatctaatgccatcttgaggcacctgggycgatccttrgggctttatgggaaagaccagarggaggctgccctggtggatatggygaatgatggggtggaagaccttcgctgcaartacrtcaccctcatctacaccaaatatgaggagggcaaggatgactaygtgaaggccctgcctggacacctgaagccctttgagaccctgctgtccmagaaccaagggggcaaagccttcatcgtgggygaccagatctcctttgysgattacaacttgctwgatctgctgctgatccaccaggtcctggcccctggctgcctrgacaacttccccctgctctctgcytaygtggcwcgdctyagtgcccggcccaagatcaaggccttcctgtcctcycctgaccatgtgaaycgtcccatyaatggcaayggcaarcagtaatggacagaagaaacagcatctgtctgtccccttttctatggctaataaagtgtgtagacaaaga

SEQ ID NO: 1657 - DNA, 1445 bp, Cricetulus griseus
tggtcctgcgaggggaggttgcttatatcgatggacaggtgttggtacccccaggctatggacaagagctacggaagtggcctcagggggctgttccccagccccctccttcagctcccgccaccaccgaagtaaccacgacacctgagagaccacgccgagtcatcccaggccttcctgacggccgcttccacttgccaccccgaatccaccgagcctctgacccaggtttgccagctgaggaacccaaagagaagccatccaggaaagtagtggagccaggtgagcccacctttctgaacagtcaccagggggcctctgtcgtcagggccaagttggggatcctctgactcacatcttctgcactgccccccactgcaaagctgatggggaccccygacggcycctgctaccctgcaccrccggtmcctagacaggcatcacctcagaacctgggstcttctggcctactgcacccacagacttcacccctgctgcactcyttagtgggccaacacatcctgtctgtcaagcagttcactaaggatcagatgtctcatytgttcaacgtsgcrcacacactacggatgatggtgcagaaagagcggagccttgacatcctaaagggcaaggtcatggcctccatgttctacgaggtgagcacccgcaccagtagctcctttgcagcagccatggcccggctcgggggcgctgtcctcagcttttcagaagccacgtcctccgtccagaagggggaatcccttgccgactctgtgcagaccatgagttcgtacgctgatgtcgttgtgctccggcaccctcagcctggagctgtggagctggcagccaaacactgtcgcagaccagtgatcaatgctggggatggagtcggagagcaccctactcaggccctgctggacatcttcactatccgggaagagctggggactgtcaatggcatgacgatcaccatggtaggtgacctgaagcatgggcgcacagtgcactccctggcctgcctgctcacccagtaccgtgtgagcctacgctacgtggcacctcccagcctgcgcatgccacctagcgtgtgggactttgtggcttcccggggcaccaaacaggaggagtttgagagcattgaggaggcgctgcccgacacggacgtgctctacatgactcgcatccagaaagagcgatttggctccacccargaatacgaagcttgctttggtcagttcatcctcactccccacatcatgacccgggccaagaagaagatggtggtgatgcatccgatgccccgagtcaatgagataagcgtggaggtggactcagacccccgagcagcctacttccgccaagctgagaacggcatgtacatccgcatggcgcttcttgccaccgtgctaggccgtttctaggccagcctcctgctggcctggtct

SEQ ID NO: 1658 - DNA, 4282 bp, Cricetulus griseus
  misc_feature (82)..(102): n is a, c, g, or t
  misc_feature (762)..(778): n is a, c, g, or t
  misc_feature (1698)..(1756): n is a, c, g, or t
aggtcgtgatggagtttgaagaggactttagcgcaagagcagacaaggacttcttgaagatgggcagaaagagtaaaaaggnnnnnnnnnnnnnnnnnnnnncccaaacgttggtatatttgggatgtttcgctatgcagattggctcgacaagctgtacatggtcctgggaactctggctgctgttctccatgggacttcacttcctctcttgatgctggtgtttggcaacatgacagatagttttacaaaagcagaaaccagtatttggccaaacatgactaatcaaagtgaaatcaacaacacagaagtcatcagcggcagtctggaggaagacatggccacgtacgcctattactacacggggattggtgctggtgtgctcatagttgcctacattcaggtttcattttggtgcctggcagctggaagacaaataaacaaaattagacagaagttttttcatgctataatgaatcaggagataggctggtttgacgtgcacgacattggggagctcaacacccggctcacagatgatgtctccaaaattaatgatggaattggtgacaaaattggaatgttttttcagtccatagcaacatttttagctgcttttatagtaggatttataagtggttggaagctaacccttgtaattttggctgtcagcccccttattggattgtcatctgctatgtgggccaaggtattgacttcattcactaataaggaacttcaggcatatgcaaaagctggagnnnnnnnnnnnnnnnnnttagcagccatcagaactgtgattgcatttggaggacaaaacaaagaacttgaaaggtacaataaaaatttagaagaagctaaaaatgttggaataaagaaagcggtcacagccaacatttccataggtattgcctacttattggtctatgcatcatatgcactggcattctggtatgggacctccttggtcctgtcgaatgaatactctgttggacaagtgcttactgtcttcttttccatactatttggaacttttagtattggacatatcgccccaaacatagaagtctttgccaatgcaagaggggcagcctatgaaatcttcaagataattgataatgagccaagcattgacagcttctcaacacagggacataaaccagacagtgttatgggaaatttagaatttaaaaatgtccacttcagctacccatctcgaagtggaattaagatcttgaagggcctcaacctgaaggtgcagagtggacagacagtggccctggttggcaaaagtggctgtgggaaaagcaccactgtccagctgctgcagaggctctacgaccccacagagggcgtggtcagtatcgacggacaggacatcaggaccatcaatgtgaggtatctgcgggaaatcattggggtcgtgagtcaggaacctgtgttgtttgccaccactatcgctgaaaacattcgctatggccgagaaaatgtcactatggacgagatcgagaaagctgtcaaggaagccaatgcctatgacttcatcatgaaactgccccataaatttgacactcttgttggtgagagaggagcacagctgagtggaggacagaaacagagaatcgccattgctcgtgccctggtccgcaaccccaagatccttttgttggatgaggcgacatcagccttggacacagnnnnnnnnnnnnnnnnnnnnnnnnnnnnnnnnnnnnnnnnnnnnnnnnnnnnnnnnnnngtgatagcccaccgcttgtctacagttcgtaatgctgacgtcattgctgggtttgatggtggtgtcattgtggagcaaggaaatcatgaagagctcatgaaagagaagggtatttactgcagacttgtcatgatgcagactagaggaaatgaagttgaactgggaagtgaagctgatggatcccagagtgacaccattgcctctgaattgacttcagaagaatttaaatccccttcagtgaggaaatcaacttgtagaagcatctgtggttcccaagaccaagagaggagagtcagtgtgaaagaggcccaggatgaagatgtgcctctggtttccttttgggggatcctgaagctaaacataactgaatggccttatttagttgttggtgtactttgtgctgttataaatggatgtatgcaacccgtcttctccatagtattttcagggatcataggggttttcacaagagatgatgaccccaaaaccaaacaacagaattgtaatttgttttcactgttttttctggtcatgggcatgatttgttttgttacatatttcttccagggcttcacatttggcaaagctggagagatcctcaccaagcgactccgatacatggttttcaaatccatgctgagacaggatataagctggtttgatgatcatagaaatagcactggcgcattgaccaccaggctagccagtgatgccgctaatgttaaaggggctatgagttcaaggcttgctggaattacccagaatgtagcaaatcttgggacaggaatcatcatatccctagtctatggctggcagttaacacttttacttgtagtgattgctccactcattatactaagcggcatgatggagatgaaagtgttgtctggtcaagctctgaaagacaagaaagagctagaagtctctgggaagattgctactgaagcaatagagaacttccgcactgtcgtctctttgactcgggagcagaagtttgaaaatatgtatgcccagagcttgcagataccatacagaaatgctctgaagaaagcacacgtctttgggatcacattctccttcacccaggccatgatgtatttttcgtatgctgcttgtttccggtttggtgcctacttggtggcacatcaaatcatgacttttgaaaatgttatgttggtattttcagctgttgtcttcggtgccatagcagctgggaatgccagctcatttgctcctgactatgccaaagccaaagtgtctgcatcgcatatcatcaggatcatggaaaaaatcccttccattgacagttacagcaccagaggcctgaagcctaattggttggaaggaaatgtgaaatttaatgaagttgtgttcaactatcccacccgacctgacatcccagtgcttcaggggctgagcctggaggtgaagaagggccagacgctggccctggtgggcagcagtggctgcgggaagagcacagtggtccagctgctcgagcggttctacgaccccatggccggaacagtgtttctagatggcaaagaaataaagcaactgaatgtccagtggctccgagcacacttaggcattgtgtcccaagagcccatcctgtttgactgcagcattgctgagaacatcgcctatggagacaacagccgggtcgtgtcccaggatgagatcgagagggcggccaaggaggccaacatccaccagttcattgagtctctgcctgacaaatacaacaccagagtaggagacaaagggactcagctgtcgggtgggcagaaacaacgcatcgccatagcacgcgccctcgtcagacagcctcacattttgctcctggatgaagcaacatcagccctggatacagagagtgaaaaggttgtccaggaagccctggacaaagccagggaaggccgcacctgcattgtgatcgctcaccgcctgtccaccatccagaacgcagacttgatcgtggttattcagaatggcaaggtcaaggagcatggcacccaccagcagctgctggcacagaaaggcatctatttctccatggtccaggctggagcaaagcgcttgtaaactgtgactgtttgaaatgctaagtgtttttaatattgttgcttaaatatggcacttaaccaaagtttaaaaaggtgaacactgttgatggtaatttcatcaagatgacagtcttcagaaacttcgtaatttaattaataaaaactgaaaaaaatgtcattgatgggggcattgtgtttaattgcattatctgagacataaaagaaacttaaagaatttttaaaaataaaatgtgtaattttgtttcagtttttaatttcaaccctactttgttaaatgattataaaggttgtaaaatgtacttaaatattccataaagtgcctataaaaactaaatgttcatataattggagtcatcttgtctgttgtgtgtattaatttatatatttttccaaataggatgctgtaaataattttagctttcataaaatggattttaag

SEQ ID NO: 1659 - DNA, 1015 bp, Cricetulus griseus
tttggggaccccswcccatcgaagactctcgctgtgaggtgaggttctctgaagagggatgtgcaaagtccctgctctggcttctaccccctcaacgacttcgcaggacagcgggggcctaggccgtcctgcgcgtgattctggaagccggggcctcgstcswscywsggskggggsttsctcttcaccgacggacttaagccgaggcctakcgcctcagtactggagtgcagagctcaattctgagcacattgtcttctccacggcctgcgctcactgccwgggggacgatggmttcctgtgtcctcctacacactggacrgragatgcctctgattggkctggggacatggaagagtaaccctggccaggtgaaagcagccattaaatatgcccttagtgtakgctaccgccacattgattgtgctgctgtctatggcaacgagattgaaattggagaggccctgaaggaaaatgtgggaccaggcaaggcagtgcctcsagaggagctgtttgtgacatccaagctgtggaacactaagcaccaccctgaggatgtakaagctgccctccsgragacactggctgatctccarctggagtatctggacctctacttgatgcactggccttatgcctttgagaggggagacaatccatttcccaagaatgacgatggaaccatccgctatgactcaacccactacaakgagacctggaaggctctggaggcactggtggcaaargggctggtgaaagccttgggcttgtccaacttcaacagtcgacagattgatgatatcctcagtgtggcctctgtgcgcccagctgtcttgcaggtggaatgccatccatacctggctcaaaatgagctcattgctcattgtcaagcacgaggcttggaggtgactgcttatagccccttgggctcctcagatcgtgcgtggcgccatcctgatgagccagtcttgcttgaggaaccagtggtcttggcactagctgagaagcatggccg

SEQ ID NO: 1660 - DNA, 2232 bp, Cricetulus griseus
  misc_feature (239)..(251): n is a, c, g, or t
  misc_feature (327)..(344): n is a, c, g, or t
  misc_feature (481)..(522): n is a, c, g, or t
  misc_feature (525)..(540): n is a, c, g, or t
  misc_feature (619)..(634): n is a, c, g, or t
  misc_feature (642)..(664): n is a, c, g, or t
  misc_feature (681)..(701): n is a, c, g, or t
  misc_feature (1343)..(1352): n is a, c, g, or t
  misc_feature (1978)..(2003): n is a, c, g, or t
  misc_feature (2167)..(2187): n is a, c, g, or t
gaagaagatgacagcagtggagaagaggttgtcatccctcagaaaaaaggaaagaaggctacagcaactccagcaaagaaggtggttgtttcacaaacaaaaaaagttgcagttcccacaccagctaagaaagctgctgttactccaggtaaaaaggcagcagccacaccagccaagaaggcagttacaccagccaaagcagttgcaacacctggaaagaagggagccacacaagcaannnnnnnnnnnnnaacccctggtaaaaagggagctgtcactccagccaagggggctaagaatggtaagaatgctaagaaggaagacagnnnnnnnnnnnnnnnnnncgacgatgatgaagacgacagtgatgaggatgaagaggatgaggaagaggatgaatttgagccaccagtagtgaaaggaaaacaaggaaaggtagctgctgctgctcctgcctcagaggatgaagacgaggaagagnnnnnnnnnnnnnnnnnnnnnnnnnnnnnnnnnnnnnnnnnnctnnnnnnnnnnnnnnnntatggagatcacacctgccaaaggaaagaaagctcctgcaaaagttgttcctgtgaaagccaagaatgtggctgaggannnnnnnnnnnnnnnngaagaggnnnnnnnnnnnnnnnnnnnnnnnagaagargargaagaannnnnnnnnnnnnnnnnnnnngaagaggaagagcctgttaaaccagcacctggaaaacggaagaaggaaatgaccaaacagaaagaagttcctgaagcaaagaaacagaaagtggaaggttcagaatcaactacacctttcaatctgttcattggaaaccttaacccaaacaagtctgttgcttgaattaaaagttgccatcagtgaacyttttgctaaaaatgatcttgctgytgtggatgtcagawctggtacaaataggaaatttggttatgtggactttgagtcagctgaagacctagaaaaggccttggagctcaccggtttgaaagtgtttggcaatgaaattaaactagaaaaaccaaaaggaagagatagtaaaaaagttcgagctgcaaggacacttttagcaaaaaatctttctttcaacatcactgaggatgaattaaaagaagtgtttgaagatgccttggagatcagattggttagccaggatgggaagagtaaagggattgcttatattgaatttaagtctgaagctgatgcagagaaaaacttggaagaaaagcaaggagcagaaattgatgggcgttctgtttcactytactatactggggagaagggacaaaggcaagaaagaactggaaagaatagcacttggannnnnnnnnnaaaaactttggttttaagtaacctttcctacagtgcaacagaagaaactcttcaggaagtgttwgagaaagcaacttttatcaaagtgccccagaaccaacakggcaaatctaaagggtatgcgtytatagaayytgcyycatttgaagatgctaaasaagctttaaattcykgtwacaaaakgsaamttgasggcagawcaaycaggttggagttacaaggacccagggggtcacctaatgcgagaagtcagccatccaaaacactgtttgtcaagggtctgtctgaggataccactgaagagaccttaaaagaatcatttgagggctctgttcgtgcaagaatagtcactgatcgggaaactggttcctctaaagggtttggttttgtagacttcaacagtgaggaagatgccaaagctgccaaggaggccatggaagatggagagattgatgggaataaagttactttggactgggccaaacctaagggtgaaggtggctttggtggccgaggtggaggcagaggaggttttgggggccgaggtggtggaagaggaggaggccgaggtggatttggcggcagaggccggggcggctttggaggtagaggaggcttccgaggtnnnnnnnnnnnnnnnnnnnnnnnnnnagacttcaagccacaaggaaagaagacgaagtttgaataattccttcccaatctttcccacttcgttttaaagaaaggactctggggttttacactgttacctgttaaatgacggagccttttaaggacatttcaagagattttttttcctacaaatattttgnnnnnnnnnnnnnnnnnnnnncgttgggggttgtaaaagaatgtttatcatgttttttttagctaa

SEQ ID NO: 1661 - DNA, 2211 bp, Cricetulus griseus
ggcctgcttcgcctcgtgccctcccgccgccgccccgcagaaatgcttcgactacccacagtccttcgccagatgagaccagtgtcccgggcgctggctcctcatctcactcgggcctatgccaaagatgtaaaatttggtgcagatgctcgagccttaatgcttcaaggtgtagaccttttagcggatgctgtagctgttacaatggggccaawgggaagaacagtgattattgaacagagttggggaagtcccaaagtaacaaaagatggggtcactgttgcaaaggcaattgatctaaaggataaatacaaaaatatcggagctaaacttgktcaagatgttgccaataacacaaatgaagakgctggggatggcrctaccactgctactgytctggcacgttctattgccaaggaaggctttgagaagatcagcaaaggggctaatccagtagaaatccggagaggtgtgatgttggctgttgatgctgtaattgctgaactgaaaaaacaatctaaacctgtgacaacccctgaagaaattgctcaggttgctacaatttctgcgaatggagacaaagacattggaaacatcatctctgatgcaatgaaaaaggttggaaggaaaggcgtcatcacagtgaaggatggaaaaaccctgaatgatgagttagaaattattgaaggcatgaagtttgacagaggatatatttccccgtattttattaacacatcaaaaggtcaaaaatgtgaattccaagatgcctatgttctgttgagtgaaaagaaaatttctagtgtccagtccattgtacctgctcttgaaattgctaatgctcatcgtaagcccttggtcattattgctgaagatgttgatggagaagctctaagcacactggttttgaacaggctaaaagttggtcttcaggtggtagcagtcaaagctccaggttttggggacaataggaagaatcagcttaaagatatggctattgctactggtggtgcggtgtttggagaagaggggctaaatctaaatcttgaagatgttcaagctcatgacttgggaaaagttggagaggtcattgtcaccaaagatgacgccatgcttttgaaaggaaagggtgagaaagctcagattgagaaacgaattcaagaaatcactgagcagctagaaatcacaactagtgaatatgaaaaggaaaaactaaacgaaagactcgctaaactttcagatggagtagcagtgttgaaggttggaggaacaagtgatgttgaagtgaatgagaagaaagacagagttacagatgctctcaatgctacaagagcagctgttgaagaaggcattgttttaggagggggctgtgctctgcttcgatgcatcccagccttggattccttaaagccttctaatgaagatcagaaaataggtatagaaattattaaaagagcactcaaaattcctgcaatgacaattgctaagaatgcaggtgttgaaggatctttgatagttgagaaaattctgcagagttcctcggaaattggttatgatgctatgctcggagattttgtgaacatggtggaaaagggaatcattgatccaacaaaggttgtaagaactgctttactggatgctgctggggtggcctccttgctaactacagcagaagctgtagtgaccgaaattcctaaagaagagaaggaccctggaatgggcgcaatgggtggaatgggagggggtatgggaggtggcatgttctaattcctagaatagtgctttgcccttatcaatgaactgtgacaggaagctcaatgcaggttcctcggtgataacttaagagaagtcacctgaagaaaatgaagagaaggctggctgatcactataaccatcagttactggttcccattgacaatacataatggtttactgctgtcattgtccatgcctacagataatttattttgtatttttgaataaagacatttgtacattcctgatactgggtgcaagagccatataccagtgtcctgctttcaacttaaatcattgaggcagttctactattctgttacagtcaggattctagtgcttgcgtgaccagatgagttcagaagcagcctttctgtggagagtgagaataattgtgtacaaagtagagaagtatccaattatgtgacaacttttgtgtaataaaattttgtttaaaag

SEQ ID NO: 1662 - DNA, 2697 bp, Cricetulus griseus
  misc_feature (1228)..(1253): n is a, c, g, or t
  misc_feature (2512)..(2552): n is a, c, g, or t
  misc_feature (2664)..(2685): n is a, c, g, or t
atgataagcgccacgagagccgccgccgcgcgtctcgtgggcactgcagcctcccggacgcccgcggccgcccgccaccaggatggctggaatggccttagycatgaggcttttagatttgtttcaagaagggattatgcgtcagagrcaattaagggtgcagttgttggtattgatttgggtactaccaactcgtgtgtggcsgttatggagggcaaacaagcaaaggtcctggagaatgctgaaggtgccagaactaccccttctgttgttgcctttacagcagatggagaacgacttgttggcatgccakcaaagcgacaggctgtcaccaacccaaacaatacattctatgctacaaagcgtctaattggacgtcgatatgatgaccctgaagtacagaaagacactaagaacgttccctttaaaattgtccgtgcctctaatggtgatgcctgggttgaagctcatggaaaactgtattctccaagtcagataggagcatttgtgttgatgaakatgaaagagactgcagaaaattacttgggtcacacagcaaagaatgctgtgatcacagtccctgcttatttcaatgactcacaacgacaggctactaaggatgctggccagatatctgggctaaatgtacttcgagtgattaatgaacctacagctgctgccctggcctatggtctggacaaatctgaagataaaatcattgctgtgtatgatttaggtggtggaacctttgatatttctatcctggaaattcagaaaggagtgtttgaggtgaaatccaccaatggggacactttcttaggaggtgaagactttgaccaagctttgttgcggcacatcgtcaaggagttcaagagggagacgggggttgatttgaccaaagacaacatggcacttcagagagttcgtgaagctgctgagaaggctaagtgtgaactctcctcatctgtgcagactgacatcaatttgccatatctgacaatggatgcttctggacccaagcatttgaatatgaagctgactcgagctcagtttgaaggcattgtcacagacctaatcaagaggactattgctccatgccagaaagctatgcaagatgcagaagtcagcaagagtgacataggagaagtgattctggttggcggtatgacgagaatgcccaaggttcagcagactgtgcaagatctttttggcagagccccaagtaaannnnnnnnnnnnnnnnnnnnnnnnnncattggagctgccattcagggaggtgtgttggctggtgatgtcacagatgtgctactcctggatgtcactcccctctctctgggtattgagactctgggaggtgtttttaccaaacttattaataggaacaccactattccaaccaaaaagagccaggtattttctaccgctgctgatggacaaacgcaagtagagattaaagtgtgtcagggagagcgagagatggctggagacaacaaacttttaggacaatttactttgattggaattcctccagcccctcgtggagttcctcaaattgaagttacatttgaccttgatgccaatgggatagtacacgtttctgccaaagataaaggaacaggacgtgagcaacagattgtaatccagtcttctggcggattaagcaaagatgatattgaaaacatggtaaaaaatgcggagaagtatgctgaagaagacaggagaaagaaggaacgtgttgaagcagttaatatggctgaaggaattattcatgacacagaaaccaagatggaagaattcaaggatcagttacctgctgatgagtgcaacaagctaaaggaagagatttccaaaatgagagaactccttgctcgaaaggacagtgaaacaggagaaaacattagacaggcagcatcttcacttcagcaggcatccttgaaactctttgaaatggcatataaaaagatggcatctgaacgggaaggttctgggagttctggtactggggaacagaaggaagatcagaaagaggagaaacaataacagtggcagcacattgtcaagccagaagagcacaacataccatgaagcttgggagtaaagggacttcctgagcagaaaaggggcaaatttcagtctttttactgtgtttttgcagtattctatatataatttccttaatatataagtttagtgacaattagctaactcatttaatgggtggtaaattcagcagtagcaggttcatactgttctgtcactagcctgttattttttcagccgcatgaaaggggttgggtggggctgtataccaatcattattaaggtatatccggtttgtgctgaatggccatgttctaggtatgaaacccatcacatgcaataagactatctgtagatcctgttggccaagagtactgctataaagaatgacctatgtgtataggattggtccttcaactgaggccttgcatgacagctacctgtgccatggtttgtaggtgcaaagctaggnnnnnnnnnnnnnnnnnnnnnnnnnnnnnnnnnnnnnnnnnggggagagatgaagtctctcttggtcctaaggcatatctttctagctaccctcttggttggcctgtgtcaggaacctgtatccttgatgattgttcttttcatccattctgnnnnnnnnnnnnnnnnnnnnnnaaaattccaaaa

SEQ ID NO: 1663 - DNA, 1843 bp, Cricetulus griseus
  misc_feature (1659)..(1697): n is a, c, g, or t
ctactcggagttagcaggattcgagccgtctcactgaccacaggccgtgtcgtgtcaccggttctgcaggcaccatgagccaggacaccgaagtggacatgaaagaggtggagctgaacgaactagaaccggagaagcagcctatgaatgcggcggccggggcggcggccggggagaagaacggtctggtgaagatcaaggtggccgaagacgaggcggaggcggaggccggggccaagttcacgggcttgtccaaggaggagctgttgaaggtagccggcagccccggctgggtgcgcacccgctgggcgctgctgctgctcttctggctcggctggcttggcatgctggcgggcgccgtggtcatcatcgtccgggctccgcgctgccgtgagctgccggtacagaggtggtggcacgagggcgccctctatcgcgtcggcgaccttcaggccttcgtaggtccgaacgcgggaggcatagctggtctgaaaaagcatctggagtacttgagcaccctgaaggtgaagggcctggtgttgggcccaattcacaagaaccagaaggatgacgtcaatggaaccgacttgaaacagattgaccccagtttaggctcccaggaagattttaaagaccttctgcaatctgccaagaaaaagagcattcacatcattttggacctcactcccaactaccggggccagagtgcatggttcctccctgctcaagctgactgggtggccaccaagatgaaggaagctctgagttcttggttgcaggaaggtgtggatgggttccaatttcgggatgtggaaaagctgatggatgcatccttgtacttggctgagtggcagaatatcaccaagaacttcagtgaggataggctcttgattgcagggactgactcctccgacctgcagcaaattgtgaccatactcgaatccaccagcgacctgctgttgaccagctcctatctatcaaattccagttttactggggagcatacaaaattgctagtcactcggtatttgaatgccactggcagtcactggtgcagctggagtgtgtctcargcagggctcctgacagcctccgtcccagctcagctcctccgactctaccagctgatgctcttcactctgccagggacccctgttttcagctatggggatgagatcggcttgcaggaagctgtcgttcctggacagcctgtggaggccccattcatgccatgggatgaatccagcctcccccaaactccgggacacataagcacgaacatgacagtgaagggccagaatgaagaccctggctccctccttacccagttycggtggctgagtgaccttcggggtaaggagcggggtaaggaacgctctctgttgcacggtgacttccgtgcactgacctcctcacctggcatcttctcctacgtccgctactgggaccagaatgagcgttacctggtggtgctcaactttcaggacgtggtcctgtcagccaggctagaggccgccaacctccctgctggtataagtctgccagccagcgctaacctattgtttagcaccaacagtacccggctaggccaagagcagggtacttctctgagtctggaaaacttgtacctgaatcctcatgagggcttgctgttacatnnnnnnnnnnnnnnnnnnnnnnnnnnnnnnnnnnnnnnncaccctcctctcttttcccctggccttttgaattatttttttctctcctttggtttgtttgtttggtttaactttttgcagattgcatatcaattctcacactgggtgtttttggcttcaaataaaaatcacccctgcctgataaa

SEQ ID NO: 1664 - DNA, 1665 bp, Cricetulus griseus
  misc_feature (693)..(712): n is a, c, g, or t
  misc_feature (1019)..(1037): n is a, c, g, or t
ggcacgagggcggcagcagctcccgcggctcctgctctgctccgcctcggccccggagcgaggggggagagcgcgcgcttgccttagtccgagccgccaccctccccgttccccgctttcccggcccgcccgaggccgcccgccccgtccccgccgccccgcagcccggccgcgccccgtcgccgccatgggctgcctcggcracagtaagaccgaggaccagcgcaacgaggagaaggcgcagcgcgaggccaacaaaaagatcgagaagcagctgcagaaggacaagcaggtctaccgggccacgcaccgcctgctgctgctgggtgctggagagtctggcaaaagcaccattgtgaagcagatgmggattctgcatgtwaatggktttaacggagagggcggcgaagaggacccgcaggcygcaaggagcaacagcgatggygagaaggccaccaargtgcaggacatcaaaaacaacctgaaggaggccattgaaaccatcgtggccgccatgagcaacctggtgccccctgtggagctggccaaccctgagaatcagttccgygtggactacattctgagcgtgatgaacgtgcccaacttygacttcccacctgaattctacgagcacgccaaggctctgtgggaggacgarggrgtgcgygcctgctaygarcgctccaatgagtnnnnnnnnnnnnnnnnnnnncagtacttcctggacaagattgacgtgatcaagcaggcygactaygtgccaagcgaccaggacctgcttcgctgccgcgtcctgacctctggratcttygagaccaagttccaggtggacaaagtcaacttccacatgttcgatgtgggcggccagcgcgatgarcgccgcaagtggatycartgcttcaatgaygtgactgccatcatcttcgtggtggccagcagcagctacaacatggtcattcgggaggacaaccagaccaaccgyctgcaggaggcyctgaacctcttcaagagcatctggnnnnnnnnnnnnnnnnnnnccatctctgtgatcctgttcctcaacaagcaggacctgcttgctgaraaagtcctcgctgggaaatcgaagattgaggactactttccagagttcgctcgctacacmactcctgargatgcgactcccgagcccggagaggacccacgcgtgacccgggccaagtacttcattcgagatgagtttctgagaatcagcactgcyagcggagacgggcgccactactgctaccctcacttyacctgtgccgtggacactgagaacatccgccgcgtcttcaacgactgccgtgacatcatccakcgcatgcacctccgccaatacgagctgctctaagaagggaacacccaaatttaattcagccttaagcacaatyaattaagagtgaaacgyrattgaaaagcrgttgatcacccaccatagggcatgatcaacaatgcaacctttccttcttctccccagtgattctgaaaaccccctcttccccttcagcttgctttgatgtttccaaatttagtaagcttaaggcggcctacaaaagaaaaaaaaagaataagaaataggccacaaaagttccctctcactttcagtaagtaaaataaaagcagcaacaaacagaaataaatgaa

SEQ ID NO: 1665 - DNA, 650 bp, Mesocricetus auratus
cagtaaggtaatgactgccttggttgtgccatgcctaggagtcagtagttcacagctcttctccctgtttcccagttcttagagtctttcctccccttattccttagtgagccctgatccttagggtgatagaagtgtctcatttagctttagcactgaactctcactaatagattccctgagattccataatgtttaaatcaagcaatttcatttgactataagaccctgtgaagttattatcttccactatgaatgggttttgatttttctgacattttctccaactcatttcctctgagaagtgtgtcctcaatccatgcagagtagcctaacttatcttctggagagcatgcctagaagcataaataatactgaactctgttcacgctgtgctcttttctacataggtatacccatgataaagtttaatatgcaatgggaatagcaagatattcacaataacaaagtgtaggtagagtcaggcagatctctgagtttgagcccagcctggtttacagaaagagttccaggacagcctcaaaaacaatacagagaaatcctatcttgaaaagccaaaaaaaattcaatgaataatatacttcaataaaccttagtgctttgaaatttcatcctggttctcagagcta

SEQ ID NO: 1666 - DNA, 179 bp, Cricetulus griseus
tgcgaagccctcaagcacagatgcaaatgtactctctgggactcactggctggcactgatattcgcagtcagatccgtagcacggatccaggagctccacgcactctccatccaccaactcaaagccatcatagcagagacattcaaagccgcccttggtgttgacacagcgctgccgg

SEQ ID NO: 1667 - DNA, 521 bp, Cricetulus griseus
  misc_feature (504)..(521): n is a, c, g, or t
aagcttttaccgccaagaggatcccagagaagaggctggagagctacaagagaatcaccagcagcaagtgtcccaaagaagctgtgattttcatcaccaagctcaagagagagatctgtgctgaccccaagcaggactgggtccagacatacacaaaaaaactggaccagagccaagctaaatcagaagctgcaactgtgtataaaacagcacctttgaatgctaacttgacccatgagtctgcagttaatgcatccactactgcctttcccaccacagacttgagaayttctgtaagagtgaccagtatgacagtgaactagtgtgacctggaatgtgatgccttaagtaatattaactttatttaacttattaatgtttcaatatccccctccctgtatacttggatttcttagatgcatgacgtggtttcattgttttccctctgtgaaccctggttctccaccctaaatgttatgagagatgacttttgtaaagatgagnnnnnnnnnnnnnnnnnn

SEQ ID NO: 1668 - DNA, 2815 bp, Cricetulus griseus
  misc_feature (174)..(202): n is a, c, g, or t
  misc_feature (2794)..(2815): n is a, c, g, or t
ggcacgaggaaatgagccatttacttggtggaagaaaatagcttgacttaattaagtataatattattaaatataattaaatataaatgatggaaaatctgattatagccacattctttttgttgttaatttgtgtgggctttatttgtttgtttgtttttggatagagttttnnnnnnnnnnnnnnnnnnnnnnnnnnnnnctcttcctgccttcatctctcaagtgctgggattctgtgtgtgagccatcacacatgtccaagtcaaatcgtggaggatgttacatgttctgtggaccttctggatcttggtggccatgacagatctctccaggaagggatgttctgctcaggcatctctgtcatgtgatgctgctggtgtgtgtgatggccgctctaggtctttcacctccatcccctcaggactcacagcagccatgaagagccttgacctgtctaacaacaagatcacctccattggccatggtgaccttcgggggtgtgtgaacctccgggccctgatattgcagtccagtgggatcaacaccatagaggaagatgccttttcttccctgagcaagcttgaatatttggacctgtctgataatcacttatccaacctatcttcctcctggttcaggcctctttcctctttgaaatacctaaacttgctgggaaatccttataggatactgggggaaacaccactgtttctcaacctcacacatttacagacccttagggtaggaaatgttgccaccttcagtgggatcaggagaacagattttgctggactgacttctcttgatgaacttgaaatcaaagcgctaagtctccagaattatgagcccggaagtctgcagtccattcaaagcatccatcacttaacctttcacctaagtcagtctgatttcctgctgggggtttttgaagatactctgagttctgtgggatatttagaactgagagatgctaacttggacagcttctacttttcagaactgtccacggatgaaatgaattcaccgatgaaaaagctggcattccaaaatgcagatctcactgacgaaagttttaatgaacttctgaagctgttgcgttacactccagaactgttggaggtagaatttgatgactgcaccctcaatggagtgggcgattttcagccctcagagtcagacgtagtgagagagctaggcaaagtagaaacgctaataatacggaggctgcacatccccagattctactcattttatgatctgagtactgtatataccctcctggagaaagttaagagaatcacagtcgagaacagcaaggtttttctggtcccttgtctgttctcacagcatttaaaatcattggaattcttggacctcagcgaaaatttgatggttgaagaatatttgaagaacgcagcctgtgagggcagctggccttccctgcaaactttaattttgaggcagaaccgtttgaaatcaatagaaagaactggaaagattttactgactctgaaaaacctgactgcccttgatatcagccggaacagctttcagtctatgcctgactcttgccagtggccaggaaagatgcgtttcctgaacttgtccagtacagggatacaggcagtaaaaatgtgcatccctcagactctggaggtgttggatgttagtaacaacaatctcatttcgttttctttgtttttgcctctgctccgagagctctatatttccaggaacaagctccacactctcccgatgcctccttgttccctgtgttactggtcatgaagatcagagagaatgccataagtactttctctaaagaccaacttagttcttttcccaaactggtgagtctggaagcaggtggcaaccacttcatctgctcctgtgaactcttgtccttcaccttggagcacccagcactggtccaggtcctggccggctggccagacagttacctgtgtgactctccctcccgcctgcgtggccagagggtccaggatgcccggccctcagtcttggagtgccaccagactctactagtgtctggtgtctgctgtgcccttgtactgttgatcctgctcataggtggcctgtgccaccatttccatgggctatggtacctgcggatgatgtgggcgtggctgcaggccaagaggaagcccaagaaagctccttgcagggacatttgctatgatgcctttgtttcctacagcgagcaggattcctactgggtggagaacctcatggtccagcagttggagaattcggaacctcccttcaagctatgtctccacaagcgggactttgttcctggcaagtggatcattgacaacatcatcgactctattgagaagagccacaaaaccctgtttgtgctttctgagaactttgtgcggagcgagtggtgcaagtatgagctggacttctcccacttcaggctctttgatgagaacaacgacgccggcatcctggttttgctggagcccattgagaagaaagccatcccccagcgcttctgcaagcttcgcaagataatgaacaccaagacctacctggaatggcccttggatgaaggccagcaggaagtgttttgggtaaatctgagaactgctataaagtcctaggttctccacccagttcctgtcatgtgctatgacatgaactgtaacaaagtttattctgacttaattatttaagtgccatagaattgtacccttgaagatttaagtataactaataattgtgagctttatcgtgaatgctgttataaaaatattttatattnnnnnnnnnnnnnnnnnnnnnn

SEQ ID NO: 1669 - DNA, 750 bp, Cricetulus griseus
gcggcgggcaccatccaaacctctgtcaatgacgtcggctccaagacacaccttacctgctctttgaacagcagtggtgtcgacatcattggccaccgctggatgagaggtggcaagatactgcaggaggacacactgcctgacctgcagacgcagtacacggtggacatagatgaccgctctggggactatgcctgcatcttccttcctgagcccgtgggcaggagcaacatcgttgtggaggggccacccaggatcaaggtcgggaagaagtcagaacattccagtgagggagaaaatgtgaggctgatctgcaagtctgagtcatctcacccccctgtcactgagtggtcctggtttaagacctctgactctggggaccagctgatcaccaacagctctgagagcaagtacgtcgtgatatccacagctgacagatcagagctgaccatcagcaaccttgacataaatagtgaccctggtacctacatgtgtaacgccaccaacacccagggcagtgtccaggagataatgacactgcgtgtgcgaagccgcctagcagccctctggcccttcctgggcatcgtggctgaggtcctggtgttggtcactatcatcttcatttatgagaagcgacggaagccggaccagaccctggacgaggatgaccctggtgccgccccactgaagggcagtggtcatcacatgaacgacaaggacaagaatgtacgccagaggaacgccacctga

SEQ ID NO: 1670 - DNA, 2214 bp, Cricetulus griseus
ctaaaacatcccaagtagggagacttctcattggtcagctaggtaacctggggtagccagtgaggccctgggccgacctctgaggtcatcccgcatacagggtcacagcacctaaaagaacagaagcaagccgaattatctcctaactctcttggccccaagctgcctcttcgcgatggcctcagccccgcctggcgtcgcacgtcagcactgcgggccacacccctgcgcacgggttgggtccggcgatatgatgaaacttcccgcacgcgttacagtagcccggctgctctaaggtaagaagcagtcctctgctccttcgtgtccctgtgctgcctcctctcccgcctcctctggccctagccaccagcgagcagagtgcctgcagttctcctgcaggatgtgtggcatttgggccctctttggcagcgatgactgcctttccgtgcagtgcctgagtgcaatgaagattgcacacagagggccagatgcatttcgttttgagaatgtcaatggatataccaactgctgctttggatttcaccggttggccgtggttgaccccctgtttggaatgcagccaataagagtgaagaaatacccttatctgtggctctgttacaatggtgaaatttacaaccacaaggcgctacaacaacgctttgaattcgagtatcagaccaatgtggatggtgagattatcctgcatctctatgacaaaggaggtatcgagcaaaccatttgtatgttggatggggtgtttgcattcatcttgctggacactgccaacaagaaagtttttctgggcagagatacctatggagtcaggcccttgtttaaagccatgacagaagatggatttctggctgtgtgttcagaagctaaagggctcgtttccttaaagcactccacaactcccttcttaaaagtggagcccttccttcctggacactacgaagttttggatttaaaaccaaatggcaaagttgcatctgtggagatggtgaaataccatcactgcagagatgaaccactgcacgccctctacgacagcgtggagaaactcttccaaggctttgagttagaaacggtgaagagcaatcttcgtatcctgtttgacagtgctgtcaggaagcgcttgatgacggacaggaggatcggctgccttttatcagggggcctggactcgagcttggttgccgcctccctgctgaagcaactcaaggaggctcaagtacagtatccactccagacatttgcaattggcatggaagacagccctgatctactagccgctagaaaggtggcaaattatattggaagcgagcatcacgaagtcttatttaattctgaagaaggcattcaggccctggatgaggtcatattttccttggaaacttacgacattacaacagttcgagcatctgtaggtatgtatctaatttccaagtatattcggaagaacacagacagcgtggtgatcttctctggagaagggtcagatgaacttacacagggctacatatatttccacaaggctccttctccagagaaagcagaggaggagagtgagagactgctgaaggaactctacctgtttgatgttctccgagccgaccgaactactgctgcccacggtcttgaactgagagtcccgtttctggatcatcggttttcctcctattacttgtcactgccaccagaaatgagaattccaaaaaatgggatagaaaaacatctccttcgagagacgtttgaggactccaacctgctacccaaagagattctctggagaccaaaagaagccttcagtgatgggatcacctcagttaagaactcctggtttaagattctacaggattatgttgaacatcaggttgatgatgaaatgatggcaacagcagcccagaagtttcccttcaatactcccaaaactaaagaaggctattactaccgccagatctttgaacgccattacccaggccgggctgattggctgacccattattggatgcccaagtggatcaatgccaccgatccttctgcccgaactctcacccactataagtcagctgccaaagcttagatattctctaaactctagtgtaaaagtgttcttctcactctgaaggcagagaccgtgagacaaacacagtaatgcaaatcaaccatcaactgctcaggcttacataggcatggaaagaaataaaaaca

SEQ ID NO: 1671 - DNA, 6108 bp, Cricetulus griseus
  misc_feature (1216)..(1264): n is a, c, g, or t
  misc_feature (4738)..(4760): n is a, c, g, or t
cccctgtgctccccggcccgcaacctgctggcatggacgtacacacccgctggaaagatcggctcccggtcggccccgctgctgtcccgccgctgctcctgctcctgctgctgctgtgggcgccgcctcagagccgcgcagctcagccaacagatcttctggagatgctagattttcacaatttgccctcaggggtaacgaaaaccacaggtttctgtgccactcgacggtcttccagagggccggatgttgcctaccgagtctctaaagatgcacaactcagcatgcccaggaagcagctgtaccctgactctgattttgctgaggacttctccatcctgactaccgtgaaagccaagaaaggcagccaggccttcctggtctctgtttacaatgagcagggcatccagcaggtggggatggagctgggccgctccccagtcttcctctatgaggaccacacagggaagcccgggcctgaggagtatccactcttccctggcatcaacttgtctgatggcaagtggcaccggattgctatcagtgtctacaggaaaaatgtcaccctgattcttgactgtaaaaagaaggttgtgaagttcctcaaccgcagtgaccaccccataatagatgtcaatggcatcatcatgtttggctctcggattctggatgacgaaatatttgagggtgacatccaacagttgctctttgtctccgaccaccgggctgcctatgattactgtgagcactacagtcccgactgcgatactgcggttcctgacacccctcagtcacaggaccctaacccagatgaatattatccagaaggagatggtgagacctattactacgagtacccatattatgaagaccctgaagacctggggaaggagcctgcccctacgcagaagccagtggaagctgccagagaaaccacggaggttcccgaggaacagacccagcccccaccagaagcccctacagtgcctgagaccagtgaccctgccggcaaggaggatgatccagggtttggggactatgactatgtgcccactgacgactactacactcctgccccctatgaagaccttggctatggcgagggtgtggagaaccctgaccagcccaccaaccctgactcaggggccgaggttcccaccagcaccatcataacctccaacacctccaatccagctccatctccaggggaagacannnnnnnnnnnnnnnnnnnnnnnnnnnnnnnnnnnnnnnnnnnnnnnnnggaaaactactatgacccctacttcgaccccgactctgactccaacgtctccccatcggagatagggccaggcatgccagctaaccaggacaccatctatgaggggattggaggacctcgaggtgagaaaggacaaaagggagagccagccatcattgagccgggcatgctgatagaggggcccccaggccctgaaggccctgcgggtcttccaggaccgccaggaactacaggtcctactggccaagtgggtgaccctggagaaaggggtccccctggtcgcccaggtcttcctggggctgatggcttgcctggtcccccaggaaccatgctcatgctgccgttccggtttggaggaggcggcgatgctggttctaagggccccatggtctctgcccaggagtctcaggcccaggctatcctccagcaagccaggttggcactgaggggaccagctggtccaatgggtcttaccggaagacctggccccatgggtcctcctgggagtggaggcttgaaaggtgagccaggagacatgggaccccagggtccacgaggtgttcaaggtccacctggcccaacagggaagcctggaagacggggccgtgctgggagtgatggagcaagaggcatgcctggacaaacaggccccaagggtgaccgtggctttgatggcctagctggattgccaggcgagaagggccacaggggtgaccctggtccttctggcccacccggacttccaggagatgatggagaaaggggtgacgatggagaagttgggcctagggggctgcccggggagcctgggccacgtggtcttcttgggccaaaagggcctcctggccctccaggacctccaggtgtaactggaatggacggccagcctggcccgaaaggaaatgtgggtccccagggagagcctgggccccccggacagcagggtaatcccggtgctcagggtcttccaggtccccagggtgccattggtcctccaggagaaaagggtcctttggggaaaccaggtctcccaggaatgcccggtgctgatggacccccggggcaccctggcaaagaaggtcctccaggagagaaaggaggccagggtcctcctggcccccagggtcccattggctacccaggtccacgaggagtcaagggggcagatggcatccgaggtctgaagggcaccaagggcgagaagggtgaagacggcttccctgggtttaaaggcgacatgggaataaagggtgaccggggggagatcggcccacctggtccccgaggagaagatggtcctgaaggtccaaagggtcgtggtggtcccaatggtgaccctggtcctctgggacccactggggagaaggggaagctcggagtgccaggattaccagggtaccctggaagacaagggccaaagggctctattggattccctggcttcccaggtgccaacggagagaagggcggcagggggacacctggaaagccaggaccgaggggacagagaggcccaacgggtccgaggggtgagagaggcccacggggcatcacagggaagcctggtcctaagggcaactctggaggtgatggcccagctggccctcctggtgagcggggacccaatggaccccaaggacccacaggcttccctggacccaagggtcccccgggcccaccaggcaaggatggactccctggacatcctggacagagaggcgagaccggcttccaaggcaagactggccctccaggacccccgggagtggttggccctcagggtcccacaggagaaaccggcccaatgggagagcgtggccaccctggccctccaggcccccctggtgaacagggccttccaggagttgctggaaaagaagggactaagggggacccaggccctgcaggcctccctggaaaggatggccctccaggattgcgtggattccctggggaccgaggacttcccggccctgtgggagctcttgggctaaaaggcagcgaaggccccccgggccctccaggtcctgcgggttctccaggagagagaggaccagctggggctgctgggcccatcggaattccagggagacctgggcctcagggacctccagggccagctggagagaaaggggttcctggcgagaaaggtccacaaggcccagctggccgagatggcctccaaggtcctgtggggcttcctggtccagccggccccgttggtcctcctggagaagatggagataagggagagatcggggagccagggcagaaaggaagcaagggggacaaaggcgagcagggtcctcctggacctacgggtcctcaaggccccattggacagccaggtccctcgggagcagatggtgagccaggtcctcgtggacagcaaggcctgttcgggcagaaaggagacgaaggctcaagaggtttcccaggaccaccggggccagtgggattacagggtttgccaggacctccaggagagaagggtgagacaggagatgtgggccagatgggacctccgggtcccccaggcccccgaggaccctctggagctccaggtgctgatgggccacagggtcctcccggaggaattggcaaccctggtgcagtgggagaaaagggggagcctggtgaagctggagagcctggtcttccaggagaaggaggtcccctgggacctaaaggagaaagaggggagaagggagaggtaggcccctctggtgctgctggaccccccggacccaaaggccctcctggagatgatggacccaaaggcagccctggccctgtgggctttcccggagaccctggtccccctggagagccaggccctgcaggtcaagatggtccacctggagacaaaggggatgatggtgaacctggacagacgggatccccaggccctactggtgaacctggtccatctggacctccaggaaagaggggtcccccaggccctgcaggtcctgaaggcaggcaaggggagaaaggagccaagggagaagccggcttagaaggccctcctgggaagactggtcctatcggcccccaaggggcccctgggaagcctggccccgatggtcttcgtgggatccctggccctgtgggtgagcaaggcctcccaggatccccaggccctgatggtccacctggccccatgggtcctccaggactccctggactcaaaggagactctggtcccaaaggtgaaaagggccatccaggcctgattggactcattggacctccaggtgaacagggtgaaaaaggtgaccgaggactcccaggcccccagggctcatctggtcccaaaggagaacagggtatcactggtccttctggcccacttgggcctcctgggccccctggcttgccgggccctccaggtcccaaaggtgctaaaggctcttcgggtcccactggcccgaagggcgaggcaggccacccaggactccctggcccacctgnnnnnnnnnnnnnnnnnnnnnnncccctgccaatccaggcatccaggactcggcggaacatcgatgccagccagctcctagacgatggggctggggagagttacttggactatgcagatgggatggaggagatctttggctccctcaactccctgaagctggagattgagcagatgaaacggccactgggcacacagcagaaccccgcccgaacctgcaaggacctacagctctgccatcctgatttcccagacggtgaatactgggtcgatcccaaccaaggatgctccagggactccttcaaagtctactgcaatttcacagccggagggtccacatgtgtcttccctgacaagaagtctgagggggccaggatcacttcttggcccaaagaaaacccaggttcctggttcagtgaattcaagcgtgggaaactgctctcatatgtggatgctgaaggcaaccctgtgggcgtggtacaaatgaccttcctgcggctgctgagtgcctctgcccaccagaacatcacctacaactgctaccagtcagtggcctggcaggatgctgccacaggcagctacgacaaggctatccgcttcttgggctccaacgacgaggaaatgtcttacgataacaacccttacatccgcgccctggtggatggctgtgctaccaagaaaggctaccagaaaacagtgctggagatcgacacgcccaaagtggagcaagtccccattgtggatatcatgttcaacgactttggtgaagcctcacagaaatttggatttgaagtggggccggcttgcttcctaggttaggagctgctgagcccacggtcttcagagcaacctcgtgacctcagcaccccacctgtgggtgtcctgtgcacggcccatcctggacagtgaacatttctcacccctgcctgcctgactcatctgtgcctcggaccctccgtggcattggaccccacaccaatgagaacaaagggaaagagccgtgttcccacggagccgaatcacatgacctagccacaccacagcctcttgccacactgcaggcctggtccccagctctcctaataggttcatcaaaggtgttcgtgaactgttggccgggagtcagggtggggcagtatttggaaatcactttaaaaaaaccaacttgaaaatatgtattccccttgaccttcaaaagatgttctaaggtggtcttgtaaaggtcgccaaagccttctctttttttgtttttaaacaaccctcaatacatccactcagaggccaaatgtcattccacgtgtgcctttccgatggattaaaggtgcttatgtttttgtgagagttttaagtaaatatttgtattgtattgtta

SEQ ID NO: 1672 - DNA, 952 bp, Mesocricetus auratus
  misc_feature (51)..(67): n is a, c, g, or t
ccggccggcccaccccccatctgcagccatggacgccatcaagaagaagannnnnnnnnnnnnnnnngacaaggagaacgccatcgaccgcgcggagcaggccgaagccgacaagaagcaagctgaagaccgatgcaagcagctggaggaagagcagcaggccctccagaagaagctgaaggggactgaggatgaggtggaaaagatctactcagagtctgtgaaggatgcccaggagaaactggagcaggccgagacgaaggccactgacgctgaggcagatgtggcctccctgaaccgccgcatccagctggtagaggaggagttggatcgggcgcaggagcgcctggctacagccctgcaaaagttggaggaggccgagaaagccgccgatgagagcgagagaggaatgaaggtcattgaaaaccgggccatgaaggatgaggaaaagatggagctgcaggagatgcagctgaaggaggccaagcacatcgctgaggactcagaccgcaaatacgaggaggtggccaggaagctggtgatcctggaaggagagctggagcgctcagaagagaggacggaggtggctgagagccgagccaggcagttggaggaggagcttcgaaccatggaccaggccctcaagtcgctgatagcctcagaggaggagtattccaccaaggaggacaagtatgaagaggagatcaaacttctggaggagaagctgaaggaggctgagacccgagcagagtttgctgaaagatctgtggcaaagttggagaaaaccatcgacgacctggaagagactttggctagtgccaaggaagagaacgtggagattcaccagaccttggaccagacccttctggaactcaacaacttgtaagggctggccgtgctgccttccatatagctgcctcctcaggccaataaaacggatgttcctggcgca

SEQ ID NO: 1673 - DNA, 1910 bp, Mesocricetus auratus
  misc_feature (323)..(344): n is a, c, g, or t
  misc_feature (1396)..(1419): n is a, c, g, or t
  misc_feature (1761)..(1777): n is a, c, g, or t
  misc_feature (1779)..(1807): n is a, c, g, or t
gaagcaactggtggatggttctgtagccttccaaaggtagtaacaaatgatttgaattattgattctttctgagcctcaccagactatttcttgcaaaactgattgcaatttattcatgaataagaagcaagtcacatagaaaacactgtaatcatacctggaacgtgttgagaaacaagcgctacacggtgattcttctcctgcacgaggaaaatgggctgtgatcggaactgtgggctcattgccggagctgtcattggtgcagtcctggctgtgtttgggggtattctcatgccagttggagacatgcttgttgagaagnnnnnnnnnnnnnnnnnnnnnnttgaagaaggaacaattgctttcaaaaactgggttaaaacaggtaccactgtgtacagacagttttggatctttgatgtacaaaacccagatgaagtggcagtgaacagtagcaaaatcaaagttaaacagagaggtccttacacatacagagttcgctatctagccaaggagaatataactcaggacccggtggacagcactgtctcttttgtacagcccaatggagcaatctttgagccttccctgtctgttggaactgagaatgacaccttcacaattctcaatttggctgtggcagctgcaccacatatatacacaaattcctttgttcaagttgtgctcaattcacttatcaaaaagtccaagtcttctatgttccaaacaagaactttgagagaattgttgtggggttacaaggatccattcttgagtttggttccatatcctattcctactacagttggtgtgttttatccttacaatgatactgcagatggagtttataaagttttcaatggaaaggatgacataaacaaagttgcaataattgattcctataaaggaaaaaggaatttgtcctattgggaaagttattgtgacatgattaatggcacagatgcagcctctttcccaccttttgttgagaagtctcgggtactgcggtttttttcctccgacatttgcagatccatctacgctgtgtttggatctgatattgaacttaaaggaatcccagtgtacagatttattcttccagccaaggcctttgcatcaccagtccagaacccagacaatcactgtttctgcactgaaaaggtcatctctaataactgtacatcatatggtgtgctagacatcagcaaatgcaaacaaggaaggcctgtgtacatttcccttccacattttctacatgcaagtcctgacatctcagaacctattgaaggcttaaatccaaatgaagaagaacataggacatacttggatgtggagcctataactggattcactttacaatttgcaaaacgacttcaggtgaacatcctggtcaannnnnnnnnnnnnnnnnnnnnnnnaaagaatctgaagagaaattatattgtacctatactttggcttaatgagactggaactattggcgatgagaaagcagaaatgttcagaaatcaagtgactggaaaagtaaagcttcttggtctggtagaaatggtcttgcttgggcttggagtcgtgatgtttgttgcttttatgatttcatactgtgcttgcagatccaagaatagaaaataagtagcaaacacgactacatttacgcactggctacatgaagatttttgataaaaccaatctaaaaatgaagacttaatatatgctttgtttttacaaaacacacctatatttagttgaagaaatggtgnnnnnnnnnnnnnnnnngnnnnnnnnnnnnnnnnnnnnnnnnnnnnncatatatctcttatatatataatatatatatatgcactaagccaaagcatatttcaaaatgattaatttgacactgtagcctatattttataaaatccagtac

SEQ ID NO: 1674 - DNA, 2061 bp, Cricetulus griseus
  misc_feature (298)..(315): n is a, c, g, or t
  misc_feature (481)..(505): n is a, c, g, or t
  misc_feature (562)..(595): n is a, c, g, or t
  misc_feature (870)..(886): n is a, c, g, or t
  misc_feature (888)..(905): n is a, c, g, or t
gtcaacttctcagagttctcgaagaagtgctcagaaaggtggaagaccatgtctgctaaagaaaagggaaaatttgaggacatggcaaaggctgacaaagctcgttatgaaagagaaatgaaaacctacatcccccccaaaggggagaccaaaaagaagttcaaggaccccaatgcacccaagaggcctccttcggccttcttcttgttctgttctgagtatcgcccaaaaatcaaaggagaacatccagggctgtccattggtgatgttgcaaagaaactgggagagatgtggaacnnnnnnnnnnnnnnnnnnaagcagccctatgaaaagaaggctgctaaactgaaggagaagtatgaaaaggatattgctgcttacagagctaaaggaaaacccgatgcagcgaaaaagggggtggttaaggcagaaaagagcaagaaaaagaaggaagaggaagatgatgaggaggatgaagagnnnnnnnnnnnnnnnnnnnnnnnnngaagacgaagatgaagaagaagatgatgatgatgaataagttggttctagcgcagtnnnnnnnnnnnnnnnnnnnnnnnnnnnnnnnnnnctcattaaagcatttaacccccctgtacacaactcactccttttaaagaaaaaaaaattgaatgtaaggctgtgtaagatttgtttttaaactgtacagtgtcttttttttgtgtgttaacacactaccgatgtgtcttggatggtcctgtcctggtggtattttcaatgaccactaacctgcctggtacagtctgggggttgtaaattggcatggaaatttaaaggcaggttcttgtttacacagcacaaattagttatatatggggacggtannnnnnnnnnnnnnnnncnnnnnnnnnnnnnnnnnnggttttttttttccatcttcagttgtctttgatgcagcttatacgaaaataattgttctgttaactgaataccactctgtaattgcaaaaaaaaaattgcagctgttttgttgacattctgaatgcttctaagtaaatacaatttttttttattagtattgttgtccttttcataggtctgaaatttttcttctcaaggggaagctagtcctttgcttttgcccattttgggtcacatgaattattgcagtgtttcttttcgtatagttagctggagaaaagcttttatctacacaccctgcatattgtgatgggtaacattttcatccatagttgaaagcccaaaattgtgattagttggataagagatagtacataaaccatgtgcaaaactgagagtgatcaattctatcacaccatggaataagaatcgaacaatctgaaagtctgccttgaaggactagtagaaaattgtgttctaatccttacgtgaggactcttcttaacgtcattactgtgtaatggcagttacattctgcagttccctattaaagacctgagaatgtatccctcaaaagcgtgagctaaaatacaagactgccatattaaactttgtgacattggtcctagcgaaggctatgataagaacgctggctgtaatgcctttgcccatctatctaaatacaggattgctcaggaaacttgactgtttaaaaaaaaagtatttttaattagttgagccagcttttcttaaaattatgccacatataaaattaagggtatattttcctacattgtgatttgtcccttataaatcagatacaaggaaagatgataaactttgcatattagtaccagttgtccaatccatttggtttttctttataaaacccaaactcattagtcatgtttaatctgcttagcagttagggaacaatttggcaattttgtgttttttttttgagattatcattctcttaaagtgccagtgtttttaaaatagcgttctgtaattttacacgctttgtgatggagtgctgtttgttatataattttgacatgggttctttacattgcgtttgtttatgtaatttgaggaggaatactgaacatgagtcctggatgatactaataaactaataattgcagaggtttt

SEQ ID NO: 1675 - DNA, 284 bp, Cricetulus griseus
aatcacccaggcataaggctgttgagttttctgcaggggccgagtctccctccaaaaggtggtgggcagacgcccaaaagtcccccagtacggtatgtccaggagactccacttgtattcagcagatgtgtatgtgtcagctccctctgccagttttgagagtcgttccattgccagatctgttcagagtgagccctgcagtggaatggtgagtggcattataagccccagcgatcttccagatagccctgggcagaccatgccaccaagcagaagcaaaaccc

SEQ ID NO: 1676 - DNA, 90 bp, Cricetulus griseus
  misc_feature (47)..(47): n is a, c, g, or t
cctctttgatgaggccttacatcaggacttggccggatttagagtcnaccaccctgaggtcctcctcttacaatccatggatgacctcct

SEQ ID NO: 1677 - DNA, 1361 bp, Cricetulus griseus
  misc_feature (1029)..(1069): n is a, c, g, or t
  misc_feature (1107)..(1123): n is a, c, g, or t
  misc_feature (1125)..(1154): n is a, c, g, or t
gcttcagcaactatggggcctctggtaggagatcagtatttattcctggtgtacgatggactttgggagcctattctacatggaaggatgctctttctgcctggacacattcagggagggcctaggccctgcccttgatgatatgacagactttgggaatcccttatggagggcctcatgctccctggggagccgaggggggatggcatgaggattagtgggggtcaggggaggagggaaaggagagggagctgggattggcatgtgaagcaggcttgtttccaatttaaattaaaaaatataaaatataaaatatggggagtggcatgtctattgtaagattattgaaaaaattatatataattcagctaaagagcctccatagtatctggattatttatggtggcatgtccttccatagcaaaaaaatgctaaaaccccagtggctgaataccatacaaatatagtttttgcacaaagtccagctcatagattttcattcagtggttcttcaggaccagcctcttcccatctcattgtattccattcagggttttaggacatttccttctagactgcagaggggaaaagagcctaaagacaacaccttggtggctttctttagcaagtccaggaactgaacacctcactcttgtcagcagtccatgaccttactcagccactcaactgcaaatgtaactgagatacccaatagaagagcatacctccatatcctaggcacagccattgcaatcaacactatatcagacattgttgattgtctcctgatgggcagcagcacactatcaaccacaagtttaatggcaatgcttttcttaacattgataaagtaaacaagtaatgaagaacaggaagagcaataagatataaaataaagaaaggacttggatgaaagggataaatattttaatgctgttgcaatggagttcagagccaatatgcagtattaaactaagagatttgattagtgttaaagagcacatctgactgttcattttcattttttcnnnnnnnnnnnnnnnnnnnnnnnnnnnnnnnnnnnnnnnnngagggttaggcttagggtgagggttagggttagggtgnnnnnnnnnnnnnnnnngnnnnnnnnnnnnnnnnnnnnnnnnnnnnnnccctactctgaaatatttgtaagatctcagtcaacatttagcctttcattctgttcttcttaagggctcgctctcctggttttttctttgttttcttttggttctgagtgtgtgatttgaaagagtcgggatgagatgagaggggagaaattctgttcatcctaagcatttctcaataaacaatattcttaggctgtgggtcacaac

SEQ ID NO: 1678 - DNA, 497 bp, Cricetulus griseus
ccgctcgctgcaaggctgtggccgaggattggctgttgaggggctcatagcactttctccggggaactgtggctgcgttccaggtggctcggccaggatcccggctgcgttctgcccgcctcgggcagccaaggcaaccatagcaccggtgatggggaccccagcctctgtggtgagcgagccacccctatggcaggcttcaactgagtcccggggacgaaagcaggcctctgccaacatattccatgatgcagagttggtgcagatccagggcctgttccagcgcattggggaccagcttgctgaagagcgatcccagatcatctgggaatgtgcaggggatcaccgtgtagctgaggccctaagaaggctgcgcaggaaaaggcccccgaggcagaaccactgtggccggctgagagcaccagagcttggttctacagcagctgacccacaggacagcaccactgacatggcttccggcgagcagtttgggaact

SEQ ID NO: 1679 - DNA, 278 bp, Cricetulus griseus
tgttattatgctgttttgtgaacctgtagaaaacaagtgctttttatcttgaaattcaacaaatggaaagaataagcatagaataatgcattctatgtagccatgtcactgtgaataacaatttcttgcatatttagccattttaattcctgtttgatttttacttctctgttgctacgcaaaatgatcaaaggaaacttcagttttacaatctgtatgcctaaaagcgggtactaccctttattttactgacttgtttaaatgattcgcttttgtaa

SEQ ID NO: 1680 - DNA, 451 bp, Cricetulus griseus
  misc_feature (80)..(100): n is a, c, g, or t
ggcgaagacaactggctgcggacattcaccaagcgcttcggtacaaagagctgaagttgccttcttacaaaggccagtcnnnnnnnnnnnnnnnnnnnnnatattttgctgatttgattgccatagtgagcaatcgcttcacactctgcccttctgcccgacatcttgctgtctatttgctggacctgctcatggatcgctatgacatctctattcagcagctgcatttagttgcactttcctgtctgcttctagcaagtaaatttgaagagaaagaagacagtgtgcctaagctggagcagctcaacagcctgggctgtatgactaatatgaatctcgtgctaacaaaacagaatttgctgcatatggaactgttactattagagacctttcagtggaacctctgccttcccacagctgcccatttcattgagtattatctctctgaagc

SEQ ID NO: 1681 - DNA, 571 bp, Cricetulus griseus
gacagcgaaggtccagaaagagatcgatcatgtgattggcagagacaggagtccctgcatgcaggacaggacccgaatgccctacacagatgcaatggtgcatgaggttcagagatacgttaacctcatccccaacaatgtgccccatgcagctacctgtaatgttaaattcagaaattatgtaattcccaagggcacggacttaataacatcattgacttctgtgctacatgatgacaaagaatttcccaaccccaaaatatttgaccctgcccattttctggatgagaatggaaactttaagaagagtgactactttatgcctttctcaataggaaagcggatgtgcatgggagaggccctggctcgcatggagctgtttctgcttctgaccaccattttacagaattttgatctgaaatctttggctgatacgaaggacattgacactaccccagtggccagtacttttggctgtgttccaccttcataccagctgtacttcattcctcgctaaagaacagactggcggttgctatgcaggtgtatgtgatatggtccatgcccttcc

SEQ ID NO: 1682 - DNA, 233 bp, Cricetulus griseus
ggctcatctcgcagctttcctaggcttaacgaaagcacttccctgtcccaggtcccgaaaaccaaagaagaagaacccgaacaaagaggacaagaggccccggacggccttcaccgctgagcagctgcagaggctcaaggccgagtttcagaccaacaggtacctgacagagcagaggcgccaaagcctggcccaggagctcagcctcaacgagtctcagatcaagatatggt

SEQ ID NO: 1683 - DNA, 784 bp, Cricetulus griseus
ctgctggagaagtctctgggactgaggccggggaataagtacagcgctcagggcgagcgacagattccagttctacaaacaaacaatggtccaagtctaacgggattggctaccattgccacccatctagtcaaacaagccagtaaagagcacctgctggggagcactgcagaagaaaaggccttggttcagcagtggttagagtacaggatcacccaagtggacggacactccagtaaagaagacacccacaccctgctgaaggatcttaattcttatcttgaagataaagtctaccttgcaggatataacatcaccttggcagatatcctactgtactacgggctccatcgctttatagttgacctgacagtgcaagaaaaggagaaatatcttaatgtgtctcgctggttttgccacattcagcattacccagacatcaggcaacatctgtctagtgttgtcttcatcaagaacagactgtatgctaactcccactagaagttcctgctgggcagcagcaagattagaagtgtaaaatgtattttggaccatggttctaatgtaaattaatgtgatgtcattgtttctttgttaatgttggtagaatttttaacatgtaaactcaagtctgaatgttttatttgtcccttagttgaaggtttgcagttttttaatgtaaaaattcaactgttattcaagcaaatcacgattagattataaattatctcatatttataggtgaaatttattttaataaaatttgcttatcagtggcagaaac

SEQ ID NO: 1684 - DNA, 546 bp, Cricetulus griseus
  misc_feature (68)..(91): n is a, c, g, or t
  misc_feature (499)..(499): n is a, c, g, or t
ctacctgtagagatggagaagaacagcaccccctctgagccagactctggccagggacctcctccatnnnnnnnnnnnnnnnnnnnnnnnnccaccaaggaagaggctgaagcccaggggcgtcagagatcatgagagcctgtagccaccaatgtttcaagaggagcccctgccccgttcctgctgctgtctgggtgctactggggaaactggccatggcctgcaaactgggaatccttttcccacccaacccactctcctccttcactcactttctcctttttaagcccacccttggagattggcttggccctcacttccaggtccctgtaccctgtgacctaagtcagggccatgtgccctggtatgaaatggggccattatatctccttagacttgtctcctaagactttgtgttggggtctggactgctgtttccacctctcaacacctctggccttctgcaggcattctaaacctttgggccgggttggggcangagtgcggtgatgaaatataaacttgagtgggtttctgagtggcatc

SEQ ID NO: 1685 - DNA, 267 bp, Cricetulus griseus
tgaagaactgcttagtttgttcaactaacacaagtgatacatctcaaagtttggttggaaaagaaaacaccagtaaagctgaaatgagatttatagctctcatggaacaaatgaaggacatggaggagagaatccaaagcatttcagactcaaaagccaacctcatagattcagaacgcttccagaatttcagtatgacaaccgaccagagacttaatgatgttctactgcagttaaattccttgattaatcggttctcaccgcggc

SEQ ID NO: 1686 - DNA, 433 bp, Cricetulus griseus
  misc_feature (119)..(148): n is a, c, g, or t
aagccctttggtgactttatggagcccaagtttgagtttgctgtgaagttcaatgcactggaattagatgacagtgacttggccatatttatagctgtcattattctcagtggagaccnnnnnnnnnnnnnnnnnnnnnnnnnnnnnnaggacattcaagacaacctgctgcaggccctggagctccagctcaagctgaaccacccagagtcctcacagctgttcgccaaggtgctccagaagatgacagacctcaggcagatcgtcacagaacatgtgcagctattgcatgtgatcaagaagacggagacggacatgagccttcaccccctgctccaggagatctacaaggatctatattagcataaaaaaaccctcccccccaccccccggctgacgtgctccctctttcaattgcactattactctggag

SEQ ID NO: 1687 - DNA, 462 bp, Cricetulus griseus
ttcagcattccgtatttccagcagactggggtccgtggctttgcacgcagtatgcccacaagtggagccctggatcgggtagcaaacgccacaaaggtcgctttgtatgagaccccaactggctggaagttttttgggaacttgatggatgcaagcaaactgtccctttgtggggaggagagcttcgggactggttccgaccacattcgtgagaaagatggactgtgggctgtcctggcctggctctccattctggccacccgaaagcagagcgtggaggacatcctcaaagaccactggcaaaagtttggccggaacttctttaccaggtatgattatgaggaggtggaagccgagggtgcaaacaaaatgatgaaggacctggaagccctgatgttggaccgttcctttgtggggaagcagttctcatcaaatgataaagtctacactgtggagaaggct

SEQ ID NO: 1688 - DNA, 565 bp, Cricetulus griseus
tttctcactggacagcccgatgccactttatattttaaagggtcacaaagatactgtttgtagtctttcgtctggaaaatttgggacattacttagtggctcatgggacaccactgctaaagtctggctgaatgacaaatgcatgatgacattacagggtcatacagctgcagtatgggcagtaaagattctaccggaacagggcttgatgttaactggatcagcagacaagactattaaactgtggaaagctggaaggtgtgagaggactttttcagggcatgaagactgtgtcagaggtttggcaattttgagtgaaacagaatttctttcatgtgcaaatgatgccagtattagaaggtggcaaattactggcgagtgtcttgaagtatactatggacatacaaattatatttatagcatatctgtctttccaaattgtagagattttgtgacaacagcagaagacagatctctgagaatatggaaacatggtgaatgtgcccaaacaatccgacttccagctcagtctatatggtgctgctgtgtgctggataatggtgac

SEQ ID NO: 1689 - DNA, 514 bp, Cricetulus griseus
  misc_feature (187)..(201): n is a, c, g, or t
agctggaccccgtggagtacaccctccggaagcgacttccccaccgcctgccccggaggcccaatgacatttatgtcaacatgaagacggactttaaggcccagcttgcccgctgccaaaagctgctggacggaggcagcagggggcagagcgcctgcgccgagatctacatccacggcttgggtcnnnnnnnnnnnnnnnccatcaacatcgccctgcagctgcaggcgggcagctttgggtccctgcaggtggctgccaacacctccaccgtggagctggtggatgagctggaaccagagattgactctcgagagccactgaccaggatccggaacaactcggccatccacatccgggtcttcagggtcacgcctaagtagatggagtgaagccagactgtcatacaccaactcctgggagcacacacatccgggcgtcatgtggctgaggttgctgctagttcataggactcttgttctcatatggacctgttgtcagagccttgtaagaa

SEQ ID NO: 1690 - DNA, 400 bp, Cricetulus griseus
  misc_feature (41)..(57): n is a, c, g, or t
  misc_feature (287)..(349): n is a, c, g, or t
aattgctagcatgacaatttttcagaaaattaggtagactnnnnnnnnnnnnnnnnnctgaagatattttgaaggtgtatatgtgtatttgtatcgttttttatgcattgccatcttaaagctcagcgatcactgaaaagttacttacagttctttgtcgactccccacctatgatgcccaaagaaagataacaaatgtgtctgatgaagtgtccagtgaggacgaccctgagacgggatactcattgcgctgtcatggggacagaacttctgaaagcagtcttcgnnnnnnnnnnnnnnnnnnnnnnnnnnnnnnnnnnnnnnnnnnnnnnnnnnnnnnnnnnnnnnntaaatgcacatatactgttttattgcttcactaactgagtggtaccatcga

SEQ ID NO: 1691 - DNA, 342 bp, Cricetulus griseus
cactcctctggtgattgctcataaaatttctgagaagttagcaggaaacgaagccctgtcccccacctccccatcgaaggagggcaggcctggggaatggaggacaccgacttctataacctgtcgaaatggggaccaggttggcgtatggcaccgacacacagcccagccggcacccaagatccaccgcttccccagcaacatatgcgtgaccaacagcgccggcaaggacttcaacaaaactatctccaaggcggccgtcaacgtgcaggagcggaaggcccatgtcctggccaacatcaatggcatgtccttcatcgccgcgggcgacacgtcatcgga

SEQ ID NO: 1692 - DNA, 303 bp, Cricetulus griseus
  misc_feature (216)..(251): n is a, c, g, or t
aatttagaggtgcaggtccaaacaagaaagtggccaaggcaagtgcagcactagctgccttagagaagttgttttctggacccaatgcagcaaataataagaaaaaaaagatcattcctcaggcaaagggtgttgtgaatacagcagtatctgcagcagttcaggcagttcggggcagaggaagaggaactctgacaaggggagcgttcgtggggnnnnnnnnnnnnnnnnnnnnnnnnnnnnnnnnnnnnggaacaccatatggttacagcactgctgcccctgcatatggtttgcccaaga

SEQ ID NO: 1693 - DNA, 477 bp, Cricetulus griseus
acatctgtatcatcggagttttggaccaatcgaatacaaaggccccatgagtgctgtttacattgagaagtttgttcgccgggtgatgaaaccacttctctacatcccatctcaatcagaattgctagattttctctcgaactatgagcctggagtactcggctactttgagttcagtggttcacctcagccccctggctacttgaccttcttcacctcagcactgcactctttaaagaaagattacctaggaacaatacgatttggggttatcacaaataaacatcttgcgaaactggtatccttagtacactctggaagtgtgtatttacatagacatttcaacacatcacttgtcttccccagggaagtcatgaacttcacagctgagaacatctataagtgggcctcagaaaaccaggagacactcttccgatggctgcagccccatggaggcaagagtctgctgttgaacaa

SEQ ID NO: 1694 - DNA, 459 bp, Cricetulus griseus
catctacgcctaccacgtggagcgggagaaggagagggacccggagcaccgggccctctgcgacctggggccctgggtgaagtgctccgccgccctggcctccagatggggtcgaggatttggtcttttgggttccatttttggaaaagatggtgtattaaaccagccaaacagtgtctttggacttatattttatatactacagttattacttggcatgacggccagtgcagttgcagctcttgtcctcatgacctcctccatcgtgtctgttttggggtctttgtacctggcctacattctgtactttgtgctgaaggagttttgcatcatctgcgtcaccacatatgtgctgaacttcattctcctcatcatcaattacaaacgactagtttacttgaatgaggcctggaagcgacagctgcagcctaaggaagactgacggctggcggattccca

SEQ ID NO: 1695 - DNA, 561 bp, Cricetulus griseus
catctgtgtgggtcctgcacgcccagagaagcctggggagcctctcgtgctaggctggctcctcccaggaccatggaggtcactgtcctcagccctggcgggcccaggcagcagcatgagcggggctcagggatgcaggatgaggaccttagtattgggcacaactccagctgtcctcctggatcttctgggtgatgggattagagagagcctcagggaatgaaggctgaaggtagccccctctgagccatattttcacatgaagcctgactggggagagagaaccccgaggataggagaattggagtttatgcacgccaaaagttgcacagcccccgtggtatttcagttagtgagtgacagtcctgaggcataaggaggtcccttgccaggcgggaaagacttcttccccagtagtcacccaccctgcccatggctcctgatcaggtggagaaccctcaggtgtttgggttgagggagcccaggccctggctggaagtagcatctcccgatggagctgggatgatgcaggaagctcagaggctggctaggtgtgtcaca

SEQ ID NO: 1696 - DNA, 566 bp, Cricetulus griseus
ccttgtggtgtgactcaggttaggatcgggccaagtccctgggcttcaggaaaccttcaggtaaacccaggtcacccagcactcctttaccatgaggactagcttaggaccgagagaaaggtctccttctcgggttgcacgcagaggctcccatctcttcccttgtggtttgttgtttttaaagatagaatctcatatgtagccccggatggcctagaactcactagatagaccaggtgactcaaactcagagacactgactctgccttctgttgttcttagcatggaagaagaagccgtctcaaactgcctcttccattctgttcagtgttcttgttgaggaatgtcttattgtttattatttttccatgctattatttttcaatgctctgtctgccgtatgtgcttctcagaagaggaaaatggagtgtcaagagtggcattagaagccccttcaccaaatgaagggattgagacacttggattaaatacactctaagtccacagcgtacagtgacaagtgaacaactatgagccgattatatttccagggtgacaccttgtgt

SEQ ID NO: 1697 - DNA, 105 bp, Cricetulus griseus
ttctttgccagaagctaaatcatggcaatgaccaccagtctcccagtagcagtaactataatggcctggtagagagctttgagctgggttccggggggcacactg

SEQ ID NO: 1698 - DNA, 402 bp, Cricetulus griseus
  misc_feature (45)..(85): n is a, c, g, or t
  misc_feature (113)..(169): n is a, c, g, or t
  misc_feature (174)..(196): n is a, c, g, or t
aagatccaggacaaggagggcatcccccctgaccagcagaggttnnnnnnnnnnnnnnnnnnnnnnnnnnnnnnnnnnnnnnnnntccgactacaacatccagaaggagtctnnnnnnnnnnnnnnnnnnnnnnnnnnnnnnnnnnnnnnnnnnnnnnnnnnnnnnnnngacannnnnnnnnnnnnnnnnnnnnnntgagcccagtaacaccatcaagaaaagcaaacaggaagatggacgcacctttctcactacactgtctagaaagagcacaccttgtgcttgttcttgggcttgaggggaggtgttttaatttaccccatcttttaagttgttaacaagtttcattgcactttgaataaagttcttgcattcccaaaggtgttggatctcgttttagc

SEQ ID NO: 1699 - DNA, 367 bp, Cricetulus griseus
tactctgcaggctgcgtcgtcaccatctctggacgcatgaccttcacgagcaacaagtccatggagattgaggtcctggtggatgctgaccctgtggtggacaactcacagaagcgataccgggccgccagtgccttcttcacctatgtatccctgaaccaggagggcaagccgctgcctgtacctcagcttgtggtgagtgtcctaaaccatgggctgcccttaggtctaatgaagtcttgagaagaagcaccctgtaagctgtaagctataggctggacagatgggtcagacctctgagctcgtcaccatggctggcacactgtctggagctcctggcaatgtgctcatgtgctggagtgatgtc

SEQ ID NO: 1700 - DNA, 166 bp, Cricetulus griseus
tttcttactgtctccccagagtcagtattgaaagttgctcgctatgctgctgagaacaacaggatcttcactttgaacttgtctgcaccgtttattagccagttcttcaaggaatccttgatggaagtcatgccttatgttgacatcctctttggaaatgagacgg

SEQ ID NO: 1701 - DNA, 371 bp, Cricetulus griseus
ccagactaatgctgccagagcagcctgctctccagacatactaaggacaaatggggaggcaccagaagaaggaggagcagatatggactgtgatggctctccgttgcctaaagacagttctgagtcggtgaatggctataaagaatataaagaaaaagtaaacagtggaagcttaactcaagcatcacaaagggggaagtctgtggaagatggagtaacacagagaagcagtgacttgccagtagagacaacagaccatgaggacgccagcaaaggtcaccccttcttgacaaacgaggagctggctgccctgccagtggtcagagtccctccttcgggcaagtacactggcactcagttgcaggccacca

SEQ ID NO: 1702 - DNA, 456 bp, Cricetulus griseus
aacttctgcattcatggtgaatgcaaatacatcgagaacctggaggcagtgacatgcaattgtcatcttgactactttggtgaacggtgtggagaaaaatctatgaagactcacagcggtgatgacaatgacctatccaagattgcattagcagccataactgtcttcgtctctgctgtaaccttgatagctgttggcatcgttgtcatagtcctgcttcgcaaacggcacctcaaggaatatgaagaagaagcagaagagcgaaagaagcttcgtcaagaaactggaaatgtgcctgtcatagcctagttgaagacaattcaggttaacagtcatgtcactgccaagtagaagcaaaaatacccacattggtcctcttctctatgaaggaagtggagcctcctgatggttccagtctctcggttgtcacttttcatgacggtcttatttctgtac

SEQ ID NO: 1703 - DNA, 517 bp, Cricetulus griseus
cccttcacagcatgggatacatctgtatggagacggttcttttctagatttcctctacctttctgctcttaaactgcttctctgctctgagaagcccagctacctgccttcactgaatatacctcaggctgagattggggcgggacagcaggtcagtggatcttcggcgggaaggtgcagctgctccgcacagtgcagctgcaccacagttcgtgctcaagagctgcaggcccagactggggcactgacgctttcggctttgggggtcattctaccaacaaacagtccttggggggaaacgtcctggaaacacacagatcagaatgcatgctaatctcacagcgagcatggaggtagcggagcctgtgtgactccataaggctctaaccaacctaagttttcattgttgagaagtgaggccagggttgtactggaccaaaggctaaggcttgccactcagcattccaagcagacttgtttcctaaaagcattccttcattttgcattccaccctggg

SEQ ID NO: 1704 - DNA, 535 bp, Cricetulus griseus
cgtggagagcgcttcataaaaccggcctggtgatccagcactgcggaggcgaaggcaaaagagcagaagttcaargtcacccktagstasmkagtctasaaaacagcatgtactcacccattcctcaragcggctcttcattcccagcctcagtccaagacccaggcctacacatatggcgtgtggagaagctgaagccggtgttaatagcrcgagagaaccatggcatcttcttctctggggattcctacctaktgctacacaatggcccagaagaggtctcccatttacacctgtggataggccakcaatcatcccgggatgagcakggcgcctgtgctgwgctggctgtgcacctcaacaccctccttggggagcggcctgtgcagcaccgtgaggttcaagggaacgagtccgaccttttcatgagctacttcccacgtggsctcaagtaccaggaaggtggtgtggagtccgcatttcacaagacatccttgggggccaccccagcagccgtcaagaagctctaccaggt

SEQ ID NO: 1705 - DNA, 1340 bp, Cricetulus griseus
  misc_feature (1082)..(1096): n is a, c, g, or t
gagttgccaggcttttgggaacccaccccccaagctaacctgcagccggaaaacagatggagccctgctgcccatcggggaagtgaagactgtcacatgggccatgaacggtacctacgtgtgccatgccgtgagctcccatggaaatatcaccagggaagtgttcctgaaagtgcttccaaaatctccgatatggcccatcatcatcattgtggtaatactggctactgtggtctttgtgggggtcctgaccatttacatttataaccgccagagaaagatcaggatatacaagctacagagggcccaggaagaggccatgaaactcaaggtcccgcctcactgagccacaagaacaccaacacctccctgggcgtcccctgcgggcagcagctagtgctgcttttgaacagaaaggtagacaaacagtgtttaccctcaccacctcaggctgtgacaagacaagatgtggcctggggatgcacccaatcagacctccttggcctcacacttgtggcctcaggactgtgaggagaggacctgacaagatcaagggtgtgtttctgtgaactggacacacccacagcctgtgggcctccagtcaggaaatgctgacctcattacctattgcccatgctggagcctctgcctaakgaggagygatatccaatakatacatagcaaagttggaacacaagagtatacttcctctgactcakgaacgctgggacattgyccccaactctycatgatgatgtatttattaaagttttacctggaggttggggatgtagctcagtggtagagcccttagcaaggccctggggttggtcctcagctccaaaaagagaaaaaaagttttacctgctatttattgagtaccttgatactagagcagcaagcaggttcttgtcaggatagtgttgcagggactggatatacaacagagcccggagagaggttcacatagggctaggggtgcctctgttggtcaggatgcttttcccaaaagagccatcacaagaatactaagtgatctaacagtggctccctgctcgtaggcctctcttggagtcctgacnnnnnnnnnnnnnnnagtaaccacttccccacctacatacattcctacctttgctccccgtgtcaaccaccatacccaaatatggatgcccacccttggcagctaaacaggggagtctcatgctcatgaaatcgtggtcaatccctgcctggttccacctcaaacaaagcctgcaagaagatgctgcaactacttaggagggtcctgcaagctggggggtggggggtacaacactcccagctcagaagactttcatttg

SEQ ID NO: 1706 - DNA, 1152 bp, Cricetulus griseus
ccatggcagcatgcactgggggcccggggtcctggagtgaaaatatactggattattttcttagaaacagtcagatcacgacagaagatggtgctgagatcatctggtatcatgcagccaaccacaagtcccagatgcaggaggcattgaggagtgctgcccacatgatagaggctgatgtccttcttcctagtgatggatcagagcatggccagccaatcatggcccatcctcctgagatgaacagtgataacactctgcargartggctggctgargkcatgaarartaacaagggcatcaagttggatttcaagartctggcagctgccaragcatccatgctgktcctggacaatgtgaarcarcacctgcagtgtcctgtgtggatgaatgcggatrttcttcctggaccaaatggaagcagcaaagttgtggatgccaaagcctttctagacaccgtgacatccttcttcccagatgtgaccttttccctgggttggacaacaggatggcatccggagaaagtcaatgaaggctatagttggacaatggtgaaagagatggactacatatgcagtggactaacccagcccgtcacgtttcctgtcagggcagctttggtcaggcagtcctgttctcagttactctggctattgaagaagtctaacaggtacagcctgactgtttggactggaaaggatgacagttatcccactgaagatttactttatattcgagactactttaataaaacccaagttttctatgatattttggaaccacaaagccatgaatttaaacaagccattgggatctgagtcactctaagaatacaagaagacattttctaatcattttctctcttggcttcaccatcattctctgctttgtctgaattcattgctgtattaattgtgattattggtttgtactaaattatccaatcaaaatgcttgttgtatacctactcttcctttatcatgtcttcatggctgcacacatctgaaagattttatgaactgcaataaaattgtataaaattatagtaaaaatgctcaagctaggtgtggtggcacatgcttataaccctagacttgggggactgaggcaggaagatcaagagttcaaggctagcctggactacattgt

SEQ ID NO: 1707 - DNA, 455 bp, Cricetulus griseus
  misc_feature (203)..(223): n is a, c, g, or t
caacttagtgttttgttgagtaactaactgttttgcaagaaatatttccatttagaaacataaaagattaatgttccaattatgcatagcttccccattatcaatcaggagagattatggggcacttgggaactattttgtctttataacaggcgtttgcaaggctgagcataatagataaatcagttccctctgaaagtgtnnnnnnnnnnnnnnnnnnnnngaaaaaaagagccaggtggkcaaacttaaattaacatcatcttgttaaagcatattttatttcactgagagaaattcaatatcaaagacttttatatactcaattaccaagaaatctttttttaagtacaatttaaaaatcattgaaaatgtgatccacatcatagccattcttttcctcaaacttaggtggacaagcttctcawagtggcagtgggaactggcatgtcaca

SEQ ID NO: 1708 - DNA, 457 bp, Cricetulus griseus
  misc_feature (340)..(361): n is a, c, g, or t
ccactgcaggagattaactgagtcttgcctttactctagcaaagcagatagctgacatggccaatgtgatgtatacactgcaaatacaccattgtacatagaagtgtgtcagccacacatcgccaagcatatttcacataagcaaggcctaacagctaaacagctttggagatctgagtttctgcatcagtagctgtaggttaggataaaaacacagtttaagatgtatatttttaagaaacaaacccttaagtctacaataattagacactatttatttacaaatgttttattaaaaattgcccaaatcagacaggcattgaggcacatgcctttaagnnnnnnnnnnnnnnnnnnnnnntaggcagatctctgtgcattcaggtcagcctggtctacatgatgacttctaggtcatctagggctatatagtgagaccttggcttaaaacaataat

SEQ ID NO: 1709 - DNA, 571 bp, Cricetulus griseus
  misc_feature (278)..(295): n is a, c, g, or t
  misc_feature (464)..(464): n is a, c, g, or t
gcgacgctgcagaccgacctaggactcctgacccataggaggccgcgccatgaagattctcctgttgtgcgtggggctgctgctgacctgggacaatggcatggtcctgggagagcaggaggtctccgacaatgagctcaagggaatgtccactcaagggagtgggtgcattaataaggaaattcaaaatgccgtccagggagtgaaacagataaagaccctcatagaaaaaaccaatgaggagcgcaagtcactgctcaacagtttagaggaagccnnnnnnnnnnnnnnnnnntgctctagatgacaccagggatactgaaatgaagttgaaggcattcccggaagtgtgcaatgagaccatgatggccctctgggaagagtgcaagccctgcctgaagcagacctgcatgaagttctatgcacgtgtctgcagaatcggctctggtctggttggccgccanctggaggagtttctgaaccagagttcacccttctacttctggatgaatggtgaccgcattgactccctgatggagagtgaccgacagcagagccaagtcctaaatgc

SEQ ID NO: 1710 - DNA, 489 bp, Cricetulus griseus
aaggtacggaggatcaccagtgaaggacagatcctggagcagccgctggaccccagtctcatcccaaagctgatgagcttcctaaaactggagaagggcaagtttagcatggtgctactaaagaagactctgcaggtggaggagcgttacccttatccggtcaggttggaggccatgtatgaggtcattgaccaaggccccatccgcaggatcgaaaagatcagacagaagggttttgtccaaaagtgtaaggcctcaggcttagagggccatgtgctccaggaagggaacaatggcggcgggggagcaggaagcacaggcctgggcagtgagaagaagaaagaggagccaaggagagcacaagtccaccccaccagagagcctcagagaaagctggccaccaccaaggcagccattacccaacctcccccaaccccaagggccactacccttcctcctgctccagtcacaacagctactcgggccacg

SEQ ID NO: 1711 - DNA, 548 bp, Cricetulus griseus
catgtgcgatgatgaggaggactacgacctggagtactccgaagatagtaactctgagcccaacgtggatttggaaaatcagtactataattccaaagcattgaaagaagatgacccaaaagcagcactaagcagtttccaaaaggttttggaactcgaaggtgagaagggagaatgggggttcaaagcactgaaacagatgatcaagattaacttcaaattgacaaactttccagaaatgatgaacagatataagcaactcttgacctatattcggagtgcagtaaccaggaactattctgaaaagtccattaattctatccttgattatatctccacttctaaacagaattctgattttttatgtcagatggatttactgcaggaattttatgaaacaacactggaagctttgaaagatgctaagaatgatagactgtggtttaagacaaacacaaagcttggaaaattatatttagagcgagaagatatggaaagcttcaaaaaattttgcgccagttacatcagtcttgtcagactgatgatgg

SEQ ID NO: 1712 - DNA, 500 bp, Cricetulus griseus
ccacaaggtgtacgatctgaccaagtttttggaagagcaccctggtggggaagaggtactgagagagcaagcggggggcgatgccaccgagaactttgaggatgttgggcactctaccgacgcccgagaactgtccaaaaccttcatcatcggggagctccatccagatgacagatcaaagatagccaagccttcggaatctcttatcactactgtcgaatctaattccagttggtggactaactgggtgatcccagccgtctcagccctggctgtagccctgatgtaccgcctctacatgggcagaagactaacctgcttctccaaaccagggacgggggaaggactgccccagagaaggggagaaaagaagccagtgttaatcacttccgctgacagaaaccttcccctgaaaggtaagtaatatatctgtttccctttccttctgtgttcgttgaacaaataagaaactctttgtgctcttaaacttttcaaatgtg

SEQ ID NO: 1713 - DNA, 559 bp, Cricetulus griseus
cgggtcttgctacctcgcggaggacgctgcacagactttgccgccagtctcctagctctcctctccaagtccgccgcggcgaacatggcctcaggagttcaggttgcagatgaagtatgtcgcattttctatgatatgaaagttcggaaatgctcctcaccggaagaaatcaagaaaagaaagaaggctgtcattttttgtctcagtgcagacaaaaagtgcatagttgttgaagaaggcaaagagatcttggttggagatgttggtgataccataaccgatcctttcaagcattttgtgggaatgcttcctgagaaagattgtcgctacgctttgtacgatgcgagctttgagaccaaggagtccaggaaagaggagctgatgttcttcctgtgggcaccagaacaggcgcctctgaaaagcaaaatgatctatgcaagctcgaaggatgccatcaaaaagaaatttcaaggtataaagcatgaatatcaagcaaatgggccagaagatctcaaccggactagtattgctgaaaaactaggtggctccttaattgtag

SEQ ID NO: 1714 - DNA, 470 bp, Cricetulus griseus
caccaggagcagatgctggcccagtacatggagagcttcactcagggctccattgaggcccacaagaggggctcccgcttctggattcaggacaaaggccctattgtagagagttacattggcttcattgagagctaccgtgacccctttggctcccgaggagagtttgaaggcttcgtggccatggtgaacaaagccatgagtgccaagtttgagcggctggtggcaagtgctgagcagctgctcaaggagctaccctggcctcctgcctttgagaaggataagttcctcacccctgacttcacctccctggatgtcctcacctttgctggctctggcatccctgccggcatcaacatccccaactacgatgacctgagacagacggaaggctttaagaatgtgtctctcgggaatgtgctggccgtggcctatgccacaaagcgggagaaactcacgttcttggagga

SEQ ID NO: 1715 - DNA, 576 bp, Cricetulus griseus
aaccacagtaactggctattcttgcttccgtgcagggatcagcaccgaaggcaacagcacagggcattctgggaacaatctgggttacaaagtggccttattcgcaggaatcatatcaggatgcatcatcttcatcgtcatcgtcatcatcatcaccttggtggttctgttgctcaagtaccgcaggaggcaccgcaaacactctccacagcacaggacaagcaaggtggcaacaactctggctgcgaacccagtgatgttctcatacccctaaggactgcagacagtgtctcccgcccacactatgagaaggtcagcggggactatgggcacccagtgtacatcgcgcaggagatgcccccacagaatcctgccaacatttactacaaagtctgaggcctgggaccttcgcctcccaagggaactctcaccttgttgtgggcgcagggactgcctgagcctggctctgggggcggaatgcctcctggaagaacctggagctggacagttttgtaggctgcaacttttcagccttggggaaactacagaccctccccagaagctggaagactgcta

SEQ ID NO: 1716 - DNA, 579 bp, Cricetulus griseus
  misc_feature (89)..(103): n is a, c, g, or t
agtagaggtacttgccaccaagcccgatgacctgagttccagtccctggacctacttggcagaaggagagagctaggttttccaagttnnnnnnnnnnnnnnncatcaataagcaaataacaagggtaattaaaagaattttaatggcaatgtaaattaaaaagaaaagtattaagctgttttgaccttgggaaacatttttttccactttcctaaggtgtgcttcccttttttgctccattaattatctcagcctcattcgtgatctgtgtagggttattgtgactgtggagaatgtattcacggccattgatgactaagtctacctactcagctctctgtgactgaggtgcctgtcatccagggaagaagctcagtgagactaccctctgcttacttaagatctctcctctgacatacctaatggcagcatccttaggtttatttaaagttcttaatgccaacagttttaaagaaatcacatgagctgtacaatgtagccagaccttgaatgtgcaaataggagactatagtacgttctcaagacgttttgctcctcgaagccctatcagttgtaaa

SEQ ID NO: 1717 - DNA, 1327 bp, Cricetulus griseus
tacacggaatgtacagatggctatgagtgggacgcagacagccagcactgccgggatgtcaacgagtgcctgaccatccccgaggcctgcaagggcgaaatgaaatgcatcaaccactatgggggctatttgtgtctgcctcgatctgcggctgtcattaatgatctacatggcgaaggccctccaccaccagtgccccctgctcaacaccccaatccttgcccaccaggctatgaacctgatgaacaggagagctgtgtggatgtggacgagtgcgcccaggctttgcatgactgtcgccctagccaagactgtcataacctgcctggttcctaccaatgcacctgccctgatggttaccgaaaagttgggcccgaatgcgtggacatagacgagtgtcgctaccgatattgccagcatcgatgtgtgaacctgccaggctcttttcgctgccagtgtgagccaggattccagctgggtcctaacaaccgttcttgtgtggatgtgaatgagtgtgacatgggagccccatgtgagcaacgctgcttcaactcctatgggaccttcttgtgtcgttgtaaccaaggctatgaactgcaccgggatggcttctcctgcagtgatatcgatgagtgcagctactccagttacctctgccagtatcgctgtgtcaatgagccgggccgcttctcctgtcactgcccacaaggctaccagctgctggccacaaggctctgccaagacattgacgagtgtgaaacaggtgcacaccagtgttctgaggcccaaacctgtgtgaacttccatgggggctaccgctgtgtggacaccaaccgttgcgtggaaccctatgtccaagtgtcggacaaccgctgcttctgccctgtctcgaaccccctgtgtcgagagcaaccttcatccattgtgcaccgctacatgagcatcacctcagagcgaagtgtgcctgcagacgtgtttcagatccaggcaacctccgtctaccctggcgcctacaatgcctttcagatccgtgctggaaacacgcagggggacttctacattaggcaaatcaacaatgtcagtgccatgctggtccttgccaggccagtgacaggaccccgggagtatgtgctggacctggagatggtcaccatgaactctcttatgagctatcgggccagctctgtactgagactcaccgtctttgtgggagcctacaccttctgaaggagaccctcagggaagggctgggtggggcccccctctttctccctctcatagcttaaggagcctggggttgaggagtgactgttctgcttaaagagac

SEQ ID NO: 1718 - DNA, 559 bp, Cricetulus griseus
ttgagcccaagagctgcacctacacctacctgctgggtgacccggagtctcgagaggctcttctgatcgaccctgttctggagacggcgcaacgggatgctcatctggttaaagagttggggctgaagctgctctatgccgtgaatacccactgccatgctgaccacatcaccggctcaggggtcctccggtccctactccccggctgccaatcggtcatctcccgcctcagcggagcccaggccgatgtgcatatcgaggaaggtgattccatccgatttggacgatttgccttggagactcgggccagccctggccacaccccaggctgtgtcacctttgtcctgaatgaccagagcatggcctttactggagatgccctgctgatccgagggtgtggacggacagacttccaacaaggttgtgctaggactttgtaccattctgtgcacgaaaagatcttcacacttcctggcaactgtctcatctatccggctcacgattaccacgggctcaccgtctctactgtggaggaagagcggactctgaacccacggct

SEQ ID NO: 1719 - DNA, 330 bp, Cricetulus griseus
ttactaccggaagcaaaggaagaagcaagcacgtctggttctgcagccgcagtcgagtgtgcatgaaacagttgatggctatagaagatatttcactcaaattgtagggttctttgtgggggaagatcacatgggacatgtgacccaaggattagtaacccgggcgtacactgatgaactgtggaacatggccctctcaaagataattgctgtccttcgagctcactcatcttactgcactgaccccgaccttgttctggagttgaagaatctcattgtcatttttgcagacactttgcagggttatggttctcaagtcaaccgactttt

SEQ ID NO: 1720 - DNA, 1020 bp, Cricetulus griseus
gtggcagacggacctgggccctcaccccagacgcaccgcggatctggcatggctcacctgatgacaatgcagttgctgctcctgctgatatgggtatctgagtgtgcccaatcaagagctactcgggccagaactgaactgctcaatgtttgcatggatgcaaagcaccacaaagaaaagccaggccctgaggacaatttacacaaccagtgcagtccctggaagaagaattcctgctgttccaccaacacaagccaggaagcccacgaggacatttcctacctgtaccgattcaactgggaccactgtggaaagatgacattggaatgcaagcgacactttatccaggatacctgtctctatgagtgttctcctaacttgggaccctggattcagcaggtggaccagagctggcgaaaagagcgaatccttgatgttcctctgtgcaaagaggactgtcagcgatggtgggaggactgccgcacctctttcacctgcaagagcaactggcacaaggggtggaactggacctcggggtataaccagtgccctgtgggagcctcctgtcgccacttcgacttctatttccctacacctgctgctctgtgtgaggaaatctggagtcactcctacaaactcagtaactacagccgagggagtggccgctgtatccagatgtggttcgacccagcccaaggcaaccccaacgaggaagtggcaaggttctatgctgaggccatgagtggagctgggcttcacggggcctggccactaatgtgcagcctgtctttagtgctgctctgggtgttcagccgagttcctttaaccttctgatccccaggaactccctgccgggcttagactcccagctcccaacctcctttgtggtggggcctctgacaggcattcaatatctctcttatgaattatttgggtgtgaatgggaatataattattttgcatcctacttaccactgattgaagttgtttaaacttggttagttccctgctctaacactt

SEQ ID NO: 1721 - DNA, 502 bp, Cricetulus griseus
tacgagccaggcagagggttgaaatgaagaccagccaaggaaatcacaccgttagtcaccctgcatggacatggtcaaattactatccacttgcgcttcctggtctttgtcatcatccagcatatggattttagactaacttgacgttaagatgttttgttttgtttttcctgctccctaagccttctcattgagtcaccccttctcagtactgcagaatcctcctcccaaattaattttctcctttcagcatcgtgatagggatgtgtttgtgacacattgtcattcatagcctgtgctcctttgtgatgacgtccctaaattctgtgatcacatcacgacttgtgttatgagtagagaggaatgggaccccaaaattggacactagaaattggtgggtggtgctcataactgaaaacacttagcttattgaagtgcctctatttacatgttctttagttataatatgtatttttctaacagaaatacacgtctgtaattg

SEQ ID NO: 1722 - DNA, 509 bp, Cricetulus griseus
ggccgtctacaaggtggctgagtatgcccggcgctttggggtgccggtaatagctgatggtggcatccaaaccgtgggccacgtggtcaaggccctggcacttggagcctccacagtgatgatgggctccctgctggctgccaccacggaggcccctggcgaatacttcttctcagatggggtgaggcttaagaagtaccggggcatgggctctctggacgccatggagaagagcagcagcagccagaaacgatacttcagtgagggggataaggtgaagattgcacagggtgtttcgggctccatccaagataaaggctccattcagaagtttgtgccctacctcatagcggggatccatcatggctgccaagatattggggcccagatcctgtctgtcctgcgatccatgatgtactcacgagagctcaagtttgagaagcggaccatgtcagcccagatagaaagcggcgtgcactgcttacactcttacgataagccgctgtact

SEQ ID NO: 1723 - DNA, 539 bp, Cricetulus griseus
tgattttgttgttcccgggcctggaaaagtagagataacctacacaccaaaagatggaactcaaaaggtgacatacgtggtgcataactttgaagaargtggcggtgttgccatgggcatgtacaacgaggataagtcaattgaagattttgcacacagttccttccagatggctctgtctaaaggctggcctttgtatcwmagcaccaaaaacactattctgaagaagtacgatggacgtttcaaagacatctttcakgagatctatgacaagcaatacaaatcccagtttgaagctcagaagatctggtatgagcataggctcattgatgacatggtggcccaagctatgaaatcagagggaggctttatctgggcctgtaaaaactatgatggcgatgtgcagtcagactcagtagcccaaggttatggttcccttggcatgatgaccagtgtgctgatttgtccagatggtaagactgtagaagcagaggctgcccatggcactgtcacacgtcactaccgcatgtaccagatag

SEQ ID NO: 1724 - DNA, 523 bp, Cricetulus griseus
  misc_feature (445)..(462): n is a, c, g, or t
gaagaagccaacaacagaagtggatcccactcattttgaaaagcgtttcctgaagaggatacgtgacttgggagagggccactttgggaaggtcgaactctgcagatatgatcctgagggagacaacacaggggaacaggtggctgtcaagtccctgaagcctgagagtggaggtaaccacatagctgatctgaagaaggagatagagatcttacggaacctctaccatgagaacatcgtcaagtacaaaggaatctgcatggaagatggggggaatggtatcaagctcatcatggagtttctgccttcgggaagcctaaaggaatatctgccaaagaataagaacaaaattaacctcaaacagcagctaaactatgccatccagatttgtaaggggatggactatctgggttcacgacagtatgttcaccgggacttagcagcnnnnnnnnnnnnnnnnnngagtgaacaccaagtgaagattggagactttggtttaaccaaagccatcgaaactgataag

SEQ ID NO: 1725 - DNA, 572 bp, Cricetulus griseus
aattggaagggatccctctgtgtccagttttagcagttctaccctcactccctcctccacatgcccctctctggtggactcaaggagcaactcaatggatcagaagaccccagaagccaactctcgtgcctctagtccctgccaagaatttgaacagtttcagatcatcccaactgtggagacaccctatttggcccgagcaggaaaacatgaatttctcaatcttgtcccagacattgaagaagtgagagcagggtcagtggtatctaagaagggatacctgcatttcaaggagccactttccagcaactgggctaagcatttcgttgtggttcgtcgcccttatgtcttcatctataacagtgacaaagacccagtagagcgtggcgtcattaacctgtctacagcccaggtggagtacagtgaggaccagcaggccatggtgaagacacctaacacctttgctgtgtgcacaaagcaccgcggggtccttttgcaagctctcaacgacaaggacatgagtgactgggtatatgcctttaacccacttttggctggcacaataagtcaaa

SEQ ID NO: 1726 - DNA, 1355 bp, Cricetulus griseus
  misc_feature (320)..(334): n is a, c, g, or t
ctcgtcagtattgaaacagaagatgagcagagactgatagaaaaattcattgaaaacctcttggcatctgatggtgatttctggattggcctcaggaggctggaggtgaagcaggtcaacaacacagcctgccaggacctttatgcttggacagatgggagcacatcacaatttaggaactggtatgtggatgagccttcttgtggcagtgaggtctgcgtggtgatgtaccatcagccatcggcaccacctggcatcgggggctcatacatgttccagtggaatgacgaccggtgcaacatgaagaacaatttcatttnnnnnnnnnnnnnnnagaagccaagtacaacaccttctataaggcctggaggtgaagcaactgagccaccaacaccagtacttccagaagaaacacagaaagaagacaccaaagaaacattcaaagaaagcagagaggctgctttgaatcttgcctacatcctaatccccagcattcccctgttcctcttactagtggtcacttcagctgcatgttgggtttggatctgtagaagaagaaaacaagagcagccagatcctaccacaaaggagcaacacaccatttggcccactcctcaccaagaaaacagccccaacctagatgtttacaatgtcatcagaaaacaaagcgaagctgatttaactgagccccgcccagacctgaagaacatctcatttcgggtgtgttctagtgaagcccctcctgatgatatatcttgtgactatgacaacatggctgtgaacccttcagaaagtgggtttgtgactctggcaagtatggagagtggatttgtgaccaatgacatttatgagttctcccctgacagaatggggaggagcaaggagagtggatgggtggaaaatgaaatatattactaagacatatgaaaaactggcaaaaatgagaaaacaaaagcaaaagcctcctatttctcacaaggaaaatgttcagaaagtttatgaagatgctcagaccagttcttaaggtgagcacagaatctccacaagttcctactggggtccccaagttctggtatgtatcccttatcccagagcctcacccagctcagccttgtgagaaggcaccttgcctaggggctgccatacagcagaccctcaataactgtcagccagtgtgctgcaactgatgttcaagggctgatgcttccaatggtcaggataaaggtgtcaccaaggagtttggaaagcccgcctctaggctccttgctctctacagcagcacgtgcaatcatagaaagacataaactctggaatcttctcaaaggctatgtatggaagccccaggctggcctgcc

SEQ ID NO: 1727 - DNA, 398 bp, Cricetulus griseus
gcctgtggtctggtcgcaagcaacctgaatctcaaacctggggagtgtctcaaagttcggggcgaggtggcccctgacgccaagagctttgtgctgaacctggggaaagacagcaacaacctgtgcctgcacttcaacccccgtttcaacgcccatggggacgccaacactatcgtgtgcaacagcaaggataacggagcctgggggactgagcaccgggagcctgccttccccttccagcctggaagcactgtggaggtatgcatcacctttgaccaggctgacctgaccatcaagctgccagatgggcatgagttcaagttccctaaccgtctcaacatggaggccatcaactacatggcggcagacggtgacttcaagattaagtgcgtggcctt

SEQ ID NO: 1728 - DNA, 584 bp, Cricetulus griseus
cagctgaatgtcactgaggagaaggtgcctttcatttttaacatcaaccccagtacaactaacttcaccggcagctgtcatcctcaaactgctcaacttaggctgaacaacagccaaattaagtatcttgactttatctttgctgtgaaaagtgaaagccatttctatctgaaggaagttaacgtcagcatgtatatggctaatggctcagttttcagtgttgcaaataacaaccttagcttctgggatgcccctcttggaagttcttatatgtgcaacaaagagcaggttgtttcagtgtctagaacgtttcagataaacacctttaacctaaaggtgcaaccttttaatgtgacgaaaggaaagtatgccacagctcaagactgcagtgcagatgaagacaacttccttgtgcccatagcggtgggagcagctctggcaggagtacttgctctagtgttgctggcttattttattggcctcaagcgccatcatactggatatgagcagttttaggacctgcaatccaattgattatattataaaatacattcaaagaacgaggttttcttgcctgtcagtgc

SEQ ID NO: 1729 - DNA, 585 bp, Cricetulus griseus
ctgggtgtttgacgaggcttccctggaacctgggtaccccaagcacattaaggagctaggccgaggactacctactgacaagattgatgcagctctcttctggatgcccaatggaaagacctatttcttcaggggaaataagtactaccgtttcaatgaggagttcagggccgtggacagcgagtaccctaaaaacatcaaagtctgggaaggaatccctgagtctcccagagggtcgttcatgggtagtgacgaagtcttcacatacttctacaaggggaacaaatactggaaattcaacaaccagaagctgaaagtagagcccgggtaccccaagtcggctctgcgggactggatgggctgcccttcagggggccgacctgatgaggggactgaggaggaaacagaggtgatcattatcgaggtggacgaggagggcggcggagctgtgaatgccgccgctgtcctactgcccgtgctgctgctggtgctggtgctggtggtaggccttgcagttttcttcttcagacgccatgggacccccaagagactgctttactgccagcgttcactgctggacaaggt

SEQ ID NO: 1730 - DNA, 554 bp, Cricetulus griseus
ggggcctacctgacgcaccagcagaaggtgctgcggctgtacaagcgcgcgctgcgccacctcgagtcgtggtgtatccacaggagaaaaataccggtactttgcttgtttgctgagagcccgatttgaagagcataagaatgagaaggacatgatgaaggctacacagctgctgcaggaggcggaagaggaattctggcaaaatcagcatcctcagccgtacatcttcccggactctcccgggggcacctcctatgagagatacgaatgctacaaggttccggaatggttcttagattactggcacccttctgagaaagcagtgtatcctgattacttttccaagagggagcagtggaagaaactgaagatggagagctgggaacgggaggttaagcagctgcaggaggagacaccctctgacggtgtcatgactgaagctctgcctcccgccagaaaggaaggtgacttgcccccgctgtggtggcatatcgtgaccagacctcggggacggcccgtgtagacactgttcacgcttgccagtgaaagaactt

SEQ ID NO: 1731 - DNA, 538 bp, Cricetulus griseus
  misc_feature (330)..(362): n is a, c, g, or t
gcaaaattcgacttactctgtgttcagcatttctattacattgactgatgaggggtatgagcatttttttgaggttgctcatgctgtcttccagtatttaaaaatgctgcaggagctaggcccagagaaaagagtttttgaagagattcagaaaattgaggataatgaatttcattaccaagaacagacagatcccgtggagtatgtggagaacatgtgtgagaacatgcagctctacccacttcaggactttctcaccggagatcagcttctgttcgaatacaagccagaagtcattgctgaagctcttaataagctggttcctcagannnnnnnnnnnnnnnnnnnnnnnnnnnnnnnnnaaggaagatgtgatctcagggagaagtggtttgggactcagtacagtatagaagatattgaaaactcttgggctgaactgtggaagactaattttgacttaaatccagatcttcatcttccagctgaaaacaagtacatagccacggactttacattgaagcctttttgattgccc

SEQ ID NO: 1732 - DNA, 1361 bp, Cricetulus griseus
  misc_feature (972)..(994): n is a, c, g, or t
gtggctttcctggatctgaggatacsaagcttaaatttgaagagatcaccagtgttatcaacccagctctggacaagtacttcccgccagactctggagtgagagttatagccgagccaggcagatactacgttgcctcagctttcacactggcagtcaatatcatagccaagaaaatcgtatcgaagggctctgacgatgaagatgagtccagtgagcaaaccttcatgtattatgtgaatgatggagtgtatgggtcatttaactgcattctttacgatcatgcacatgtgaagcccctgctgccgaagagacccaagccagatgagaagtattactcatccagcatctggggaccaacatgcgatggccttgaccggattgtggagcgctgtaatctgcctgaaatgcatgtgggtgattggatgctctttgagaacatgggtgcatacactgttgctgctgcatctactttcaacgggttccagaggccttctatctactatgtgatgtcgaggccaatgtggcagcttatgaagcagatccagaaccatggcttcccaccagaagtggaagagcaggatgttggcactctgcccatctcttgtgcccaggagagcgggatggaccgtcatccagcagcctgtgcttctgctagtatcaatgtgtagatgccattcttgtagctcttaccttcaagtttagcttgaattaagggatttggggggaccatttaacttaattactgttagttttgaaatgactttgtaactacagagtagggcttggcacagatgaagtatggaaggctaggagatgggtcacacttacctgtgttcctatggaaactttgaatatttgttttatatggatttttatcacttttcagacatactaacgtgtgcccctcagccactgagcaagcatttgtagcttgtacatttggcagaatgggccaaaagctaatgttgnnnnnnnnnnnnnnnnnnnnnnntcttgaaataattgggcatcagggaatgtttgcaatgtcccttaaagaagggacacacttcctgcacaggctgctgtagtcatacgagtgagtccaaacatagcagagaaggaaaaggtggatgggacaaggctataccctctacacagcatcagtttgcctagccagtccttaaagtgtgtacttggctgtgaagttggtgaggaacgtcatctgcctagcgacctgatatcctggccacaccccagggaaggcatctaaggctttttgaaccttgcctgcagaagccttgaatgttcctcaacccttgacttcgcctgcatcaccacctagtaacagttggaagtatcatacagcacttggcaat

SEQ ID NO: 1733 - DNA, 544 bp, Cricetulus griseus
gatctttttgattcccatgacgacagagatgacgatggggaggcagggtcggtggaggagcacaagagtgttatcatgcacctcttatcacaagttaggctcggaatggatcttacaaaggtagttcttccgacgtttattcttgagagaagatctcttttagaaatgtatgcagacttcttcgcacatccggacctgtttgtgagcattagcgaccagaaggatcccagggatcgaatggttcaggttgtgaaatggtatctctcagccttccatgcaggaaggagaggatcagtagccaaaaagccgtacaatcctattttgggtgagatctttcagtgtcactggacattgccaaatgatactgaagagaacacagaacttgtttcagaaggaccggttccgtgggtttctaagaacagtgtaacatttgtggctgagcaagtttcccatcatccacccatttcagccttttacgctgagtgttttaacaagaagatacaattcaatgctcatatctggactaaatcaaaattccttggga

SEQ ID NO: 1734 - DNA, 1345 bp, Cricetulus griseus
ccattcagagttttaaggacaagacgatcagctccagtctggcagttgtggatttaattgatgccatccagccaggctgcattaactatgaccttgttaagagcgggaatcttacagaagatgacaagcacaataatgccaagtatgcagtgtcaatggctagaagaattggagccagagtatatgctctccccgaagaccttgtggaagtaaaacccaagatggtcatgaccgtgtttgcatgtttgatgggcagggggatgaagagagtgtaaaataaccaatctgaatagaaccatccttactcacaggtgcatgattggcaagtcagctattcccaggtgaagtgctcatggcttaaagaattctcagtcatttaaaggacttttagttttgattaacaagactagctcatcatgacagccttcggggaaagacttttagaaacaagcaactcctttcccttccagttggatctgttcagcacacctgaacatgctcacagccggccatctgctctctcctcctagaatactgcccttgacatttcctgatgcttgtgtattacctctctgtgtatcttttcctcttaggctgtccatctcttgagacttgcttagatcggtagatagccatagtattaacttgccattttgctttccaagttcttactggagaactgtggtcagatactatgtggagatgtgagtgtccttgcttactttgtagtgctgaaaatctgctcatgttactggctgtgcagaatatactagaagcttttctcattcttttattcttaaaagcagtatctttttacagtattctttctacatgattatttttttgtacatttaagaatattttgattacggtcaacaagtctgctgatttgttacttttttaaaggggacttcaagtaagtaaaagaaaaagcataaactatagggggaggaaaatggaccctaagtttgttgtatttccccctcacacccaggatcaaatcaaatgaaatactttgtcttcaatgaatcagttcgacacatgcttctttgttttgaacactttatcacaaaactctcatttgatctaaaatgctgttgaatatgacacctttgaggagagagtgggctcagaatttagatgggactcaataagcaaagtatgctaagtgtacaatagatttttaaatttaacgcatctaacaaggagatgtggtcacgaaaaggggaaagtatgtatgtcggacttgatgttctcttcctttgtcaagctttttgctgtagttctcaagatcatatgttaatctaactctgaaaagtgatgtaatctggtagcaacatagtac

SEQ ID NO: 1735 - DNA, 521 bp, Cricetulus griseus
ccacagctgttatgccagatggacaattcagagacatctgcctaagtgaatacagagggaaatatgtcgtattcttcttttaccctcttgattttacttttgtgtgccccactgagatcattgctttcagtgatagggcagaagaatttaagaaactcaactgccaagtgattggagcttctgtggattctcacttttgtcatctggcatggattaatacacccaagaaacaaggaggattgggacccatgaacattcctttggtatcagatcccaagcgcaccattgctcaagattatggagtcttaaaggctgatgaaggtatctctttcaggggcctctttattatcgatgataaaggtatccttcgacagatcactataaatgatcttcctgttggaagatctgtggatgagattctgagactagtccaggccttccagttcactgacaaacatggtgaagtgtgcccagctggctggaaacctggcagtgataccatcaagcctgatgtccaaaag

SEQ ID NO: 1736 - DNA, 403 bp, Cricetulus griseus
gtgaagtcactctgcctccgtcaaaacttaattaaatgcattgagaacctggaggaactgcagagtctccgagaactggatctctatgataatcagatcaagaagattgagaatctggaggcgctgacagaattggagattttagatatttcttttaatctgctgaggaacattgaagggattgacaaactgacacggctgaaaaaactcttcttggttaacaataagatcaataaaattgagaacataggtaccttacgtcaactgcagatgctggagctgggttcaaaccgcatccgggcaattgaaaatatcgacacgttaaccaacctggagagtttatttctgggtaaaaacaaaattacaaaacttcataacctggatgcacttaccaacctgacag

SEQ ID NO: 1737 - DNA, 335 bp, Cricetulus griseus
ctcggacactgaagtcagagaggacaccagcaacaaaaggtgaccaggagcctccaggatgtctgagctggagaaggccatggttgccctcattgatatcttccatcagtattcaggacgggagggtgacaagcacaagctgaagaaatcagaactcaaggagctcatcaacaatgagctctcccacttcctggaggaaatcaaagagcaggaagttgtggacaaagtcatggaaacactggatgaagatggagatggagagtgtgacttccaggaatttatggccttcgtctccatggtgactacagcctgccatgagttctttgaacaagagt

SEQ ID NO: 1738 - DNA, 547 bp, Cricetulus griseus
catctgaccctgagggagcagagatgtgggaatgggggccgtgccaattgtgacgcctccttgattgtgacggaggagctgcatctgatcaccttcgagactgaggtataccaccagggcctcaagattgacctcgagacccactccttgccagttgtggtgatctccaacatctgtcagatgccaaacgcgtgggcatcaatcctgtggtataacatgctgaccaacaaccccaagaatgtgaacttcttcacgaagccaccaattggaacctgggaccaagtggcagaggtgctcagctggcagttctcatccaccacaaagcgagggctgagcattgagcatctgactacactggccgagaagctcttaggacctggtgtaaactactcagggtgtcagatcacatgggctaaattttgcaaagaaaacatggctggcaagggcttctccttctgggtgtggctagacaatatcattgaccttgtgaaaaagtatatcttggccctttggaatgaagggtacatcatgggcttcattagcaagg

SEQ ID NO: 1739 - DNA, 495 bp, Cricetulus griseus
  misc_feature (451)..(465): n is a, c, g, or t
tgccgccatcttcctcgggcggaagccggcttctaggtgggagttcagtggcgggtgccgtgggtagcgcggacggtcggccggtgccatgccgtcatcaccgctgcgggtggcggtcgtgtgctcgagtaaccagaaccggagcatggaggcrcacaacatcctcagcaagcggggtttcagtgtccggtcctttggaacaggaactcatgtgaagctcccaggaccagcacctgacaagcccaatgtttatgacttcaaaaccacatatgaccagatgtacaatgatcttctcaggaaagacaaagaactctatacgcagaacggaattttacatatgttggacagaaataaaaggatcaagccccggcccgaaaggttccagaactgcaaggacctgtttgacctgattctcacttgtgaagaaagagtctatgaccasgytgtasannnnnnnnnnnnnnnataacaggagacctgccagtcagtgcatgt

SEQ ID NO: 1740 - DNA, 564 bp, Cricetulus griseus
  misc_feature (364)..(423): n is a, c, g, or t
gctgtggttgttacgctctacaggatgggttttcctgaagctgccagctccttcagaactcatcagattgaggctgcgcccaccagctctgcaggtgatggattcaaggcagatcttgtctttaaggagatcgagaagaagcttgaagaggaaggagaacagttcgtgaagaaaattggtggcatttttgccttcaaagtgaaggatggccctgggggcaaagaagccacctgggtggtagatgtgaagaacggcaaagcatcagtgctgcccaactcagataagaaggctgactgcactatcaccatggctgactcacacttgctggctttgatgactggtaaaatgaaccctcagtcggccnnnnnnnnnnnnnnnnnnnnnnnnnnnnnnnnnnnnnnnnnnnnnnnnnnnnnnnnnnnnctccagcttcagcctggcaaagctaagctatgaagatctccatttggaaacctcagcacatcaggatgagatggatagatatgtagatatccacctctcattgtcaggacttagtccgacatttcccgattagcatgaagt

SEQ ID NO: 1741 - DNA, 412 bp, Cricetulus griseus
acggagcggatggtgctttttatccagatgaaatccaaaggccacctgtgcgagtcctatcttgggaagacaatgttgtctgtagccagccagctcgaaaccttagccgtccggatggtttagaagatcctgaggacagcagagaagatgagaatgtgcctgaccctcctgatccagccagtcagcatttacgtggtcatggagcaggtttttgctttgattccagaagctttgatgttcacaagaagtgtcccctctgtgaattgatgttccctcccaactatgatcagagcaaatttgaagaacacgttgaaagtcactggaaggtgtgcccgatgtgcagcgagcagttcccgcctgactatgaccagcaggggtttgaaaggcacgttcagacccattttgatcagaa

SEQ ID NO: 1742 - DNA, 488 bp, Cricetulus griseus
gcaacaggcgttttgcaatgcagacgtagtgatcagggccaaagcrgtragcgagaaggaggtggaytccgggaaygacatctacggcaaccccrtcaagaggatycartatgagatcaagcagataaagatgttcaaaggccctgacaaagacatcgagttyatctacacrgccccctcctcrgcartgtgcggggtctcgctggacgttggaggaaagaaggagtatctaattgcaggaaaggcagaaggrgayggcaagatgcacattaccctctgtgacttcattgtgccctgggacacrctgagcaccacccagaagaagagcctgaaccacaggtaccagatgggctgcgagtgcaagatcacacgctgccccatgatcccatgctacatctcctccccggaygagtgtctctggatggactgggtcacagagaagagcatcaacgggcaccaggccaagttctttgcctgcatcaagagaa

SEQ ID NO: 1743 - DNA, 466 bp, Cricetulus griseus
  misc_feature (326)..(345): n is a, c, g, or t
ctcggtgggcaccatgtcgaggcatgcgaaccgtggcaccgagagcaagaaaatgagttctgagctatttacgctgacgtatggagcgcttgtcacccagctgtgcaaggacgatgaaaacgatgaagacgtgaataagcagctggacagaatgggctataacattggagtccgactaattgaagattttttggcacgttcaaatgttggaagatgtcatgattttcgggaaactgcggatgtcattgctaaggtggcattcaagatgtacttatgcatcactccaagcatcacgaattggagcccagctggcgatgaattctccnnnnnnnnnnnnnnnnnnnngttggtggactttgtggagcttcccgatagccactcatcccttatttactccaacctcctgtgtggggtgctgcggagagccttggagatggtccagatggctgtggaagccaagtttgtc

SEQ ID NO: 1744 - DNA, 1072 bp, Cricetulus griseus
  misc_feature (29)..(34): n is a, c, g, or t
ctctctgtcgattatggaaagaagtccannnnnnagttctccatctacccagccccccmggtttccactgctgtggttgagccctacaactccatcctyaccacccacaccaccctggagcactctgattgtgccttcatggkagacaacgaggccatctatgacatctgtcgtagaaacctcgacattgagcgccccacctacactaacctwaaymgsytsatwrgycarattgtgtcttccatcactgcttccctcagatttgatggagccctgaatgttgacctgacagaattccagaccaacctggtaccctaccctcgcatccatttccctctggccacatatgcccctgtcatctctgctgagaaagcctaccatgagcagctttctgtagcagagatcaccaatgcctgctttgagccagccaatcagatggtgaaatgtgaccctcgccatggtaaatacatggcttgctgcctgctgtaccgtggggatgtggttcccaaagatgtcaatgctgccattgccaccatcaagaccaagcgyascatccagtttgtggactggtgtcccactggcttcarggttggcattaattaccagcctcccactgtggtacctggtggagacctggctaaggtccagagagctgtgtgcatgctgagcaacaccacagccattgctgaggcctgggctcgcctagatcacaagtttgatctgatgtatgccaagcgtgcctttgtgcactggtacgtgggtgagggcatggaggagggggagttctctgaggcccgtgaggacatggctgccctagagaaggattatgaggaggtgggtgtggattctgttgaaggagaaggtgaggaagaaggagaggaatactaaattaattgtcacaaaggtgctgcttttacagggaagtttattctgttccaacaaagaaagctgtggtctgatcagttaatttgtatgtggcaatgtgtgctttcatacagttactgacttatggttgaaaatatgaatgacttgtcatagacccaagccgtccatttcactgatgggttttaaa

SEQ ID NO: 1745 - DNA, 544 bp, Cricetulus griseus
tgatttcttccttccagccaaagcgaaaagcattctcttcaccccaggaagaagaagaagctggattcacaggacgcaggatgaattctaagatgcaggtgtattcaggttccaagtgtgcctatctccccaaaatgatgaccttgcaccagcagtgtatccgggtgcttaaaaacaatattgactctatctttgaagtgggaggagtcccctattcagttcttgagcctgtcttggagaggtgtacacctgatcagctctatcgaatagaggagtgcaatcacgtattaattgaggaaacagatcagttatggaaagttcactgtcaccgagactttaaggaggaaagaccagaagagtatgaatcctggcgggagatgtatctgcggcttcaggatgcccgagagcagcggctgcgcctgctaacaaacaacatccggtctgcacatgccaataagccgaaaggacgacaagcaaagatggcatttgtcaactctgtggccaaaccacctcgagatgtccgacgaaggcaagagaagtttgg

SEQ ID NO: 1746 - DNA, 550 bp, Cricetulus griseus
tgctggactggatgtggacttcaccttggagagccctcagggcgtgctgttggtcagtgagtctcgaaaggctgatggggtgcacacggtggagcctactgaggccggggactacaggctttgctttgacaactccttcagcaccatctcagagaaactagtgttctttgagctcatctttgacagtttccaagacgaggaggaggtagaaggttgggctgaagctgtggagccagaagagatgcttgatgtcaaaatggaagacatcaaggaatccatagagactatgaggacccggctggaacggagcatccagatgctgactctgctacgagcctttgaggcacgtgatcggaaccttcaagaagacaacctggagcgggtcaacttctggtcagctgccaatgtggctgtgttgctgttggtagccgtcctgcaggtctgcacactcaagcgcttcttacatgacaagcgccctgtacccacgtagccccagccacagaggatgaatgaagcaacggagggcgaccggcatgtgtgacttgctgga

SEQ ID NO: 1747 - DNA, 422 bp, Cricetulus griseus
  misc_feature (365)..(392): n is a, c, g, or t
acgcggcggtttctagaaggcgcaagatgctcataatgcatggactggggagagaagaggaacacggttgcctccatcgctgcgggcattctatttttcacaggatgggggatcatcatatatgcagctgtcatttatcccagcatggaagaattcagccgctcataccatgcttgtggcgtcatagcgaccatagccttcctcatgattaacgcagtgtcgaatggacaagtgcgaggtgacagctacagagaacgctgtctgggccacacaaaaaagcccatagtatatcctggaattgctgtatttttccagaatgccttcatcttttttggagggctggtgtttaagtttggtcgcacggnnnnnnnnnnnnnnnnnnnnnnnnnnnnatacagcacaggcgccctgtatgggatttt

SEQ ID NO: 1748 - DNA, 1238 bp, Cricetulus griseus
  misc_feature (376)..(438): n is a, c, g, or t
gtgtagcccgtcgtccactgcattccccaaagtgaatattcaagtgtctaggcagtggcacattttcacactacaaataccattgtggaattggagacaaacaacagatttagatgcctacatatcatgaccagaagcactttagtataaagggcacagtgtagatatttttaccaatttcattttttagtactcaactgttgaaatcaaatatttagtctttcaaattctttaatgctttttctccctctggtagatatgggaacttattgctctgcattttttaattattgaggtataatacagcaacctctggcccagtgagatggctcactgagtaatggtgcttgctacacaaacctgaccacctgagttnnnnnnnnnnnnnnnnnnnnnnnnnnnnnnnnnnnnnnnnnnnnnnnnnnnnnnnnnnnnnnnagtgccctgtagcacacatgcccatcaataataataataaacaattaaaaaaataagtcaccctttcgagatacctttgagaacaaagaactggcctgtatgctttggtgcttggagagacccactatagcatttgccagagtgtcattctgaactctaggtgattgcttccctagagttcccctgtttgtgctctcacactttacagaaagctgcactgtctttacaagaccttctggatcagggttcaccgtgctttgggtaaaacaacaatggagactccaaaggagggaaaacaagagggactgccagagctcagatctccacggccaccctgaagcaaatcttgtcaatacctatcagctctgaaatgtattgacttttgtggcagatagtatctccggtttggatggtgtcctagcttgattcactgagtgtgtaataaaaccctgggcagaagtaaggaagaagttcatttccacttacaggtcacagccggttgtcaagggaagtgaggcaggaacatggctccctggctccatttccatgtcttactcagcttgcttttcttatacaaccagggccgcctgccaaggggtggctctgctcacaacagtaacaacaaaaagcacttcagacaatgcccacagactaatctgttagagacagtccctcaattgagatccccaggcaattatatttgtcaaattggcaaaacccagcacaggcggttttctctagcattaagactttagaacatttgagcacatttgttgtaagtgactgatatcccaaatcat

SEQ ID NO: 1749 - DNA, 586 bp, Cricetulus griseus
cttgtgatgtcaaacctctatagccttaatgcaggatctttgaccatgagtgaaaagcgggagtttcctacagtacccttggttaaattaggaagttcctttaccaaggttcaagattacctaaggaggtttgaaagtatacctgacatgctggaattggatcacctcactgtttctggagatgtgacatttggaaaaaatgtttcattaaagggaacagttatcattattgcaaatcatggtgacagaattgacatcccccctggagcagtgttagagaacaagatcgtatctggaaatcttcgaatcttggatcactaagataagcgctgccggatacactttatactaattatgggttaaacagtttcttgtaataaaatgtcctctaagattctcaaatgagcaagtacttttactgtgcagtgttgattttttagagttttctgcaatgtgcttttagcctaaagagaagatagatggagcagtactgtccttttttgatgaagagcctagagatgagttcatctaaaagtgcaatattatttaatcgtagaactgggccagctcggcaatcttttaacag

SEQ ID NO: 1750 - DNA, 554 bp, Cricetulus griseus
agtacaaatcggtgacaataacagggtgtgccttattttgatacttggctccttttcattaggaggaccctcgttttttgtaagcactactgaccctgctgtatttaagatgctctcatgttaagtgtcaagatgtttgctttcttgttcttatgtattatttctgaaagtattttaatcaaaagtaaccctttgaagtttttataaaacgatgaccaaagtttctcttttgccaaaagttaaatacaaataaaatgttcacaagtctgtccctcatagataatttcaagtaagtgccaaaagtaactcaaggtgcccttgaagaaacagtgttaatacagtgtgagccttcgacattttcacagtccttcccataaaaatgctgtagataatgctgctcctccagacttggtttctcccatatagctatggaggtgagctgaactcgcgcctgtagatgagacgtttataagctatggcctccagcgcactgtgagcagcagctcggcagtctcacatcaaagctcttgaatgctatttactgcttctacccg

SEQ ID NO: 1751 - DNA, 1016 bp, Cricetulus griseus
cgtccgaaatggttcaatgtaaggaacggatacggtttcatcaacaggaatgacaccaaggtaagacgtatttgtacaccagactgccmtataagaagaataaccccaggaagtaccttcgcagygtakgagatggagagactgtggagtttgrtgttgttgaaggagaaaaggtgcggaggcagcaaatgttacaggccctggtggagttccagttcaaggcagtaaatacgcagcagaccgtaaccattatagacgctatccacgtcgtaagggtcctccacgcaattaccagcaaaattaccagaatagtgagagtggggaaaagaacgagggatcggaaagcgctcctgaagggcaagcccaacaacgccggccctatcgtaggcgaaggttcccaccttactacatgcggagaccctatgggcgtcgaccacagtattccaaccctcctgtgcaaggagaagtgatggagggtgctgacaaccagggtgcaggagagcaaggtagaccagtgagacagaatatgtatcggggttacagaccgcgattccgcakgggccctcctcgccaaagacagcctakagaggacggcaatgaagaagacaaggaaaatcaaggagatgagacccagggtcagcaaccacctcaacgtcggtatcgccgcaacttcaattaccgacgcagacgcccagagaaccctaaaccacaagatggcaaagagacaaaagcagccgatccaccagctgagaattcgtccgctcccgaggctgakcagggcggggctgagtaaatgccggcttaccatctstaccatmatccggkttgggtcwtccmacaagaagaaatgratwtgaaattccascmwtwagaaawkaacaaaratkggagcysaaraccttaagtgcttgctttttgcccgttgaccagatacactagaactatctgcattatctatgcagcatggggtttttattatttttacctaaagatgtctctttttggtaatgacaaac

SEQ ID NO: 1752 - DNA, 553 bp, Cricetulus griseus
ggtcatatgtctacttttgatcatctacattacagtaatccctgggatttcttacccagttttaaatgatgctgctttcatctgtttagcaaatgtacctgatggtttcctctaactagctcagttgacctttttaaaaggtttgatccttgagcaccttcaacaaaaattgaacactttgatcaggatattttatttattccactgtgcaaataaaaccaaatgctttgtcaacaagatggaatccatggtaaaaaggaaagaagtcggttacaaagacaaattagagggaagtttgtcctgttaaccaagtggggttattccttcattccaggttactgacttactatctgggattgatgggtaagacagcttgttgacagtgtcttcctgtttggattgttacagtgtcttagtgtgcccctcctgttacagctttccacactcaacctacttgcttctgtatttctgcttcctgtatattcttactacatatttttgactccagaagaatgacatctttagactgtttcagagccaatgatgatatttc

SEQ ID NO: 1753 - DNA, 1360 bp, Cricetulus griseus
gatcttcagaccagacaactttgttttcggtgagttacatggaatgaattcctttgtacccaagggcatgattccagaggtgaaaggtgaagattagtaatgataatgacgtaatttttttcccttctcaccacattccaggtcagtctggggcaggcaacaactgggctaagggtcactacacggagggagctgagctggttgactctgtcctggacgtggtgcggaaggaggcagagagctgtgactgcctgcagggcttccagctgacccactcgctgggtggaggtaccggttctggtatgggcaccctgctcatcagcaagatccgagaagaatatcccgaccgaatcatgaataccttcagtgtggtaccctcacccaaagtgtctgacaccgtggtggagccctacaatgccaccctgtctgtccatcagctggtggagaacaccgacgagacctactgcatcgacaacgaggccctgtacgacatctgcttccgcactctcaagctcaccacgccgacctatggggacctcaaccacctcgtctcggccaccatgagcggggtcaccacctgcctccgcttcccaggccagctcaatgccgacctccgcaagttggcggtcaacatggtccccttcccacgtctccacttcttcatgcctggctttgcccctctcaccagccgtgggagccagcagtatcgggccctcactgtgcctgaactcacccagcaggtcttcgatgccaagaatatgatggcagcctgtgacccccgccacggccgatacctcaccgtggctgccgtcttccgtgggcggatgtccatgaaggaggtggacgagcagatgctgaacgtgcagaacaagaacagcagctactttgtagagtggatccccaacaacgtcaagaccgccgtctgcgacatcccaccacgcggcctcaagatggccgtcaccttcattggcaacagcacggccatccaggagctcttcaagcgcatctccgagcagttcacggccatgttccgccggaaggccttcctgcactggtacaccggcgagggcatggacgagatggagttcactgaagccgagagcaacatgaacgacctcgtctccgagtaccagcagtaccaggatgccaccgcggaagaggaagaggatttcggggaggaggcagaagaagaggcctaagccagagagagagagccctgcgtcttctcctcaggctacttagttccctcagctttcttcagctgcccgtttttctccttcagagttttcttttctgctgcctctgtcctgtttttttatttttttccatgggggggtaaacagtgcctggcacatagtaa

SEQ ID NO: 1754 - DNA, 505 bp, Cricetulus griseus
cattgctatggatggtactgaaggcttggttaggggccagaaagtcctggattccggggcaccaatcaaaattcccgtcggtccagagaccttgggccgaatcatgaacgtcattggagaacctattgatgagagaggcccaatcaaaaccaaacaatttgctcctattcatgctgaagctcctgagttcatagagatgagtgtggagcaggagatcctggtgactggtataaaggttgtggacctgctggccccatacgccaagggtggcaagatcggactcttcggtggggctggcgttgggaagacagtactgatcatggagttaatcaacaatgtcgctaaagcccatggtggttactctgtgtttgctggtgttggtgagaggacccgcgaaggcaatgatttgtaccatgaaatgattgagtctggtgttatcaacctaaaagatgctacctccaaggtggcgttggtatatggacagatgaatgaaccacctggtgct

SEQ ID NO: 1755 - DNA, 217 bp, Cricetulus griseus
agtttgaagcttattccatctcagataataattatggcggaatcaagaagttactgcgacagcttttcctaaaagctcctgtgaacacctgggagaggtaacagatctcttgattcaacagatccctatttgggagtggtgattaagccaacggatatttcataagaccgcgatgatgaagtatatgaacatgagatcttccgcttcataagcctct

SEQ ID NO: 1756 - DNA, 498 bp, Cricetulus griseus
aatgggtcagtattcctacagaactctttttaactcaaataactaatttcagaaaattaagaaaactaactttgtatttggaattttgaaatatatggttgttagcatttggaataatgcttaaagtatgcctaaaaaagcacccaagaaaaatttcagttcatttacagaaaaaggtattttgtaatagtatagtagtgtattgcatagtactgttttaaagctgtaagtggagtttgtataaattcacaataattgatataaatagatctacagggatgatctgagatggattctttatcactcccatcccactgtgcctgtcatgggtgctgccagtaattcctagatggttgagatacgatggaggtgccgacagataccactgtagcattgcagtaaccttacacagcaagaaagggaataaaatactaagttcctaacagctgctttgtagctgtaaagttgttcaactagtcactcctgtttaaaaggaag

SEQ ID NO: 1757 - DNA, 395 bp, Cricetulus griseus
  misc_feature (95)..(122): n is a, c, g, or t
agaattcgtacagatgatgactgcaaaatgaagacccactttcaactacttttccctctagaagaatcaaattgaaatcttttacttacctcttnnnnnnnnnnnnnnnnnnnnnnnnnnnnttcatttattcattctgtttctatctagcaaaactgaatgtcaaacgtaccttctgtccacacacaaaatctgcatgtattggttgggggtcctgtcccctaaaaatcaagcccccacatcagttttacagtataaatactcgtactaccttctaaggaagcacctaggggactccttaaagttccatttgctaatgattaataatacactgtttgggctggccagtttctcatgcatgcagcttgacaattgagcacagtcaggcctttgtt

SEQ ID NO: 1758 - DNA, 580 bp, Cricetulus griseus
aggagcaccatgtccgcggaagttcccgaggcagcgtcggcggaggagcaaaaggaaatggaagataaagtgactagtccagagaaagctgaagaagcaaagttaaaagcaaggtatccacacttgggacaaaagcctggaggttccgattttttaaggaaacgattgcagaaagggcaaaagtattttgattctggggattacaacatggcaaaagcaaagatgaagaacaagcagcttcctgcagcagccccagataagacagaggtcactggtgaccacattcccactccacaggaccttcctcagcggaaaccatccctggttgctagcaagctggctggctgattaaaagagctgaactgcatgagtcttctaatgtcctttatttctccttactacgttacttacccactttctgtttcctttcactcactatgtcatttgagactgacagctttgcaggtagtggtagtatgtgctgctgttgtaagggagcatacatgtgtagaggtttcggttagtttaacagtgcactgatgcaaaggacatgtaacagcaacttaagttacgataattg

SEQ ID NO: 1759 - DNA, 541 bp, Cricetulus griseus
tggtggctctggaaatcattctgaccactgcttcagccaccataggagtggcaagatcccatctgccaggtgaagggcagaccactgacttttgacctgtacctgctggtccttctgacttatagagctttcttgctagctggaggccttgtgctcccagccatctgacctcctccacgtttctgcaggcccagcatgggtgaattcaatgagaagaaggcaacatgtggcacagtctgcctcaagtacctgctgttcacctacaactgctgcttctggctggccggcttggccgtcatggcagtgggcatttggacattggtactcaagagtgactacattagtctgctggcttcaaacacctatctagccacagcctacatcttattggtggctggtggcgttgtcatggtgaccggagtcctgggctgctgtgccactttcaaggagcgacggaacctgttacgcttgtacttcatcctgctcctcatcatcttcctcctggagatcattgctggcatcctggcctatgtctactacc

SEQ ID NO: 1760 - DNA, 543 bp, Cricetulus griseus
ggagcgcttggaagcccttgatgccaattctcggaagcaggaagcagagtggaaagaaaaggcaataaaggagctggaagaatggtatgcgagacaggatgaacagctacagaaaacaaaagcaaacaacagggcagcagaagaagcctttgtaaacgacatcgatgagtcatccccaggcactgaatgggagcgggtggcccgcctgtgtgactttaaccctaagtccagcaaacaggccaaagatgtctctcgcatgcgctcagtcctcatctccctgaagcaggcccccctggtgcattgaagagctaccctgtggaaacactacgtctgcaatatcttaatcctactcagtgaagctgttcacgtaattggattaattatgttgagttcttttggaccaaaccttttgtctttagagttgatcattgtttgtgattgcatgtttccttcaactgtgttctccctggcattcagagaagataggggaggaggaggggagggatgctcccaacagtagcctcaacccgtgcttttgtgcat

SEQ ID NO: 1761 - DNA, 181 bp, Cricetulus griseus
gccaaggatcctttgcccgtggggacgtgcagcagtccggaggcttgtggaagtgtttatttatattgtccttttttaccgaagatatgcatactccatcgatgttgtattcacagtggctgaggaattcttgtacccagtttctttggcttcaagtccgattaaaagaccgtgtgaaacg

SEQ ID NO: 1762 - DNA, 518 bp, Cricetulus griseus
  misc_feature (299)..(315): n is a, c, g, or t
ggattcaagcaatggggccctgctgcccttctatgacccagacaccagtgtggtctatgtctgtggcaagggtgactccagcatccggtactttgaaatcacagatgaggctccctacatccacttcctgaatacattcaccagcaaagaaccccaaaggggtatgggtagcatgcctaagaggggcttggaggtcagcaagtgtgaaattgcccggttctacaaactccatgaacgcaagtgtgaacccatagtcatgaccgtgccaagaaagtccgacctcttccaggatgatcttnnnnnnnnnnnnnnnnnacctgaggctgctcttgaggcagaggattgggtgagcgggcaggatgctgatccgatcctgatctcactacgggaagcatatatgcccagtaaacaacgggatctgaaggtcagccggcgaaatgtgctatcggacagtcggcctgccagttccagccgccctggagcctccacagctaccacaatttctgatgttttcagtg

SEQ ID NO: 1763 - DNA, 535 bp, Cricetulus griseus
gcctgacggagcagaagagacagcatggagttggagaggatcgtcagttcagccctccttgcctttgatcagacacacctcccagaggcggacctcagtggcttggatgaggtcatcttctcctatgtgcttggggtcctagaggacctgggcccctcaggcccctcagacgagaactttgatatggatgccttcacggagatgatggaggcttatgtgcctggctttggccacatccccagaggcatgataggggacatgatgcagaagctctccacacagctgagtgatgccaggaacaaagagaacctgcacccacagagctcctgtgtccaaggtcaggtgcccatttttccagagaccccgaggcaacttgaaaagctcaaagaagacaccaggtctccggctgccactgggggcacccaaaatgaggcagctggtgctgaggaagaacttctgccaggagtagatgtgctcttggaggtattccctacctgttctgtggaacaggcccagtgggcgttggccaaagccc

SEQ ID NO: 1764 - DNA, 571 bp, Cricetulus griseus
ggacaaattccagaagccaaatacattcaacawgaagaggaagttccagccagatggtaaaagcgacgaatcakcagccmagaaacccawatgggatgacttcgaaaagaataataaagagctgaagcagagcaggcagctcagtgataagaccaactatgacatcgtggttcgagcaaagcacatttgggaragcttgagaagaaaagactgygrtmaagaaaawagaaggaagctgatgagtgatttgcagaaattgattcmasggaaaattaaaactattgctttcgcacatgactcgacacgtgtgatccagtgcttcattcagtatggaaatgaagagcagaggaagcaggcttttgaagaactacaaggtgacttggttgaactaagtaaagccaaatattccaggaatattgtcaagaaatttctcatgtatggaagtaaaccacagatagcagagataatcagaagttttaaaggtcacgtgaggaagatgctgcgacattcagaggcatcagccatcgtggagtatgcgtacaatgacaaagccattttggaacagaggaac

SEQ ID NO: 1765 - DNA, 450 bp, Cricetulus griseus
tcccggcggtaagatggcggctaccgcggagtgcgatgtggtaatggcggggaccgagcctgaactgctagaggacgaagaagcaaagagggaggcagaatccttcaaggaacaagggaacgcatactatgctaagaaggactacaatgaagcttataactattacacaaaggccatagatatgtgtcctaaaaatgctagctattatggtaatcgagcagccacactgatgatgcttggacggttccgggaagctcttggagatgcgcagcagtcagtgagactggatgacagttttgtccggggtcacctccgtgaaggcaaatgccacctctcacttgggaatgcaatggcagcatgccggagtttccaaagagccctagaactggatcataaaaatgcccaggcacagcaggagttcaagaacgccaatgccgtcatggagtatga

SEQ ID NO: 1766 - DNA, 552 bp, Cricetulus griseus
  misc_feature (64)..(83): n is a, c, g, or t
attgaaagtgatgctccagagccagctgagccagaggatgacctggatattatgcttggcaatnnnnnnnnnnnnnnnnnnnntgtcaaattcccagatgaagatgaaatactagaaaaagacgaagctttagaagatgaagacagcaaaaaagacgatggcatttcattcagtaaccagactgggcctgcttgggcaggctcagaaagagactatacatatgaggagttgctgaaccgagtgttcaacatcatgagagaaaagaatccggatatggttgctggagagaagaggaaatttgttatgaaacctccacaggttgtccgagtaggaaccaagaaaacttcttttgtcaattttacagatatctgtaaactattacatcgtcaacccaaacatctcctcgcatttttattggcagaattgggtacaagtggttctatagatggtaataaccagcttgtaatcaaaggaagattccaacagaaacaaatagaaaatgtcttgagaagatatatcaaggaatacgtcatttgtcacacatgccgatca

SEQ ID NO: 1767 - DNA, 430 bp, Cricetulus griseus
  misc_feature (314)..(348): n is a, c, g, or t
agagcctgaagaacctaaagtgctaacacctgaagagcaattagcagataaactccgtttaaagaagctacaggaagaatcagaccttgaattagcaaaagaaacttttggtgttaataatacaggttatggaatagatgctatgaacccatcttcaagagatgacttcacagaatttggaaaattactaaaagataaaattacgcaatatgaaaaatcactatattatgccagttttttggaagccttagttcgagatgtctgtatttcattggaaattgatgacttgaaaaagattaccaattcattgactnnnnnnnnnnnnnnnnnnnnnnnnnnnnnnnnnnnaaacaaagccaaaaagaagaagaaaggtgtggttcctggagggggattaaaggccaccatgaaagacgatctggctgattat

SEQ ID NO: 1768 - DNA, 531 bp, Cricetulus griseus
actgtctgtcgtgtaacctgatgtctcaacccccagggagaagaagagtcaatctttggtgttcaccaacatgggaagcttcaccagaacaggcttttgctttgggctctgctgttggtttgcagatcacccaagagcaagccaacatgcgcttcccagcagtaccttagggttttgccattgtaaatgggtctaatgtgatatgacaagaccagagaaattggatgtaaattgacatttttggaaatgcttgttgtttcacatgatacatttagggtatgcagctccttttgtagtttttatttttactatttaagtttggaaatgatgccaaatttttgtatttctttaatcaatgtgttctccttggtgatatatattgcattatatattgatgtgtgtatcaatatatactgatatgtgttacacttacgcatacaaacacacataagtgaggggtggaaccgtagcctgcactccctagcctctgcagagagaccctaagagcagaatctcggtgttgtgatgtac

SEQ ID NO: 1769 - DNA, 415 bp, Cricetulus griseus
gatgctaactgcacccttgccactgccaaagcaatagaggcagaagcatcccctctttgccacccagcccagctttgaccctggcattaaccagactttttccaggaaaactgggttctggcaaggagtggcattgtttcttccaatctgctgattttcttgtctgcacctaaaacacagcagtatgctcccatgaccctctgccattccattggtcttcaggacccaggattctggggctgaaatgttgaagaaacgccagtgacttattccagagtgcctcagttaggggaacttctgtaaagaaccctgggtgttgagcaaaaaccttattaatattattaatgacctataattagaagcttcctgcctcttttttttctttttggttgctcctgtggaaatactaaaatta

SEQ ID NO: 1770 - DNA, 554 bp, Cricetulus griseus
ccttcaagttataggccaagtagctcaggctctgggaaccccatgcctagcaaccctgactggggcgagttttcagagttcacaggaagtagcagcccggcaataaagaaagagtaccacactggaaaactgaccacctctaaaggagataaagagctcgtgatcggaaacgagaaagccacctccactagcaccagcacaagcacgacacgtcgttcatgctctaaaaccattaccaagactgtgataggtcccgatggtcaccgagaagtggtcaaggaagtggtcacctccgatgatggctccgattgtggtggcaccggagacttaggcatgacccacggttttggtggcaggtttgatgaatttgcccacaggttccccgaccaagctgccttttttgatagtcacttcgattctctctcgtctaactacaaagaagttggcagtaagacccacactgcaggctctgattcggacatcttcacagacttaacagacccgggctcccatgtgcctgagtacccttccagtagcaaaacctcaactgtcag

SEQ ID NO: 1771 - DNA, 337 bp, Cricetulus griseus
ggccaacatgcattctaccagcttattcaccaaggcaccaagatgataccctgtgatttcctcatccctgtgcagacccagcaccccatacggaaaggtctgcaccacaagatccttctggccaacttcttggcccgggcggaggccctgatgaaggggaagtcaaacgaataggctaagaaggaactccaagctgccggaaagagcccggaggacctggagaaactcctgccacacaaggtctttgaaggaaatcgcccaaccaactccatcgtgtgcaccaagctcacaccattcattctgggagccttgattgccttgtatgaacacaagatct

SEQ ID NO: 1772 - DNA, 450 bp, Cricetulus griseus
ggcgtgaccttcacatagacaggtcaccactaacttctttaccacccacttcacctataacttctgcagacctgtcacaagtttacatgtaaccacagaaatctgttcttgtgactcattagctaatggacactgttctcagcaagggaggctgaatcagccccttaagagagattaggttagaggatcatgtacaagctgatgtgtaaaagtaggaatcacgtgtatcagaaagccggttaggtactttttctacataaagtccctgcctgcctcctggctgtgctgccttgttctaagcccttcccaacagggtcagtgctgttgccagggaaggcagtcaagagcactcatccacttctggacaagtctgggaacttggacacataaaagaataggtgtgtggcattttccaaaggtggcatggcccttaaatgagttattgctatt

SEQ ID NO: 1773 - DNA, 537 bp, Cricetulus griseus
  misc_feature (505)..(505): n is a, c, g, or t
cacggctggtgtctggaattttgatggctctaaaccaaactctccctcatccctttgtctcccacttttctgaaagagtttacacaagcaagaaaatcacagcaccaaaaacctgtcagccatggcattggaatagaagctttactgaagcatccgttggtatcaggggttcccctgtggacccaactgagaccactcatattagaggttgtgagaggaaaaaaacctagcctagttctgtcatccacagttgtccttgtgtttgccctcccagtatggagcaactgtgtcagcagatcacattacagaaattgtgctttacagaaaccaataagtctgttgctgttaccacttcagcgaggacagtaaatgatgttgtgtctggtcagcctgtctcctcttgtcattgctgttctatagagtttcatcccgttctgcttgactgaccattaacctcatcctgtcgggacttacgtaagcatggacagcataactttctgctcangccagaccctcctttctcagcaaggaaccgtg

SEQ ID NO: 1774 - DNA, 542 bp, Cricetulus griseus
cgcattgacgatctggagaaaaatatcgctgacctcatgacccaggctggtgtggaagaactggaaggggaaaacaagattgctactgcacagaaaagttgaaggtgctgacattcacaccgagtccagaacatctttttcccaagccaagagaaaaccaactggctttctgcaactaactactatgtgttgacaggtttatgaagcgtgtattcttatcacaacagcctacatagtccatagagtgtccctcccctgcatccccagtttctcaaacttggtatattcacatcttggtcagttgtcttaattattaaacactaaaactttggcggtttctgcataaaattgtcaaactttttagtgatttttgaagtcctttcctgctgttcttcttgcggtagttactgtttgatgacatgacagagtacttcccagttaggtgactagtgactcctccccttggcagaagccgtgatgtgagatgtgtacgtttagggttctttctttcagcacatagtgactgccgaactgacactaga

SEQ ID NO: 1775 - DNA, 518 bp, Cricetulus griseus
tgtacacattggaagcaaaagctttggctgaagaacaaaagcgtttaaaccctgactgctggaaaaggaaaagaaccaactcgggctctcaacaacattgaacctgatgcttgtgtttgtaagtctgtatctacataagtactgactctggatggaaaagcttggaagaccttggtctcaccatttgtcctgaatttgcgtgaacataagatactgatagtattgagtcctgaagtgatttaatgagtgaggatttgctttctccattagagcattaagtaagctacaactatcaacattgtaaaccaaattgccttattttccttccaaacttcatatatgtctatcaggtaatataggcttgaaaattgataccctgtggtgctaaagtacagtagaaagacgtgtatacgtgttttcttttaaattgtaagaaggggaattaaaacatatgtaactgctctttatatcagctccttactgcttattaatctgtattgtacccatgatatcaggaa

SEQ ID NO: 1776 - DNA, 1339 bp, Cricetulus griseus
  misc_feature (29)..(48): n is a, c, g, or t
tggccattgcaatggcgcttacaggaggnnnnnnnnnnnnnnnnnnnnactgtacacctgaattccaggccaatgaagttcggaaagtaaagaaatatgaacagggattcataactgatcctgtagtccttagccccaaggatcgtgtgagggatgtttytgaagccaaagccaggcatggcttctgtggtatccccatcacagatacaggccggatggggagtcgactggtgggcatcatttcttcaagggatattgattttctcaaggaggaagagcatgaccgtttcttggaggagatcatgacaaagagggaagatttggtggtggcccctgcaggcatcactctgaaggaggcaaatgaaattctgcagcgcagtaaaaagggaaagttgcccattgtgaatgaaaatgatgagctggtagccatcattgctcggacagacctgaagaagaatcgtgattacccattggcttccaaagatgccaaaaagcagctactatgtggggcagccattggtactcatgaggatgacaagtataggctggacttactggctcttgctggtgtggatgtagtggttttggactcttcccagggaaactccattttccaaatcaatatgatcaaatacatgaaagagaaataccccaatctccaagtcattggaggcaatgtagtcactgctgctcaagccaagaacctcatagacgcaggtgtggatgctctgcgagttggcatggggtgtggttccatctgcattactcaggaagtgttggcctgtggtcggccccaagcaacagcagtgtacaaggtttctgagtatgctcggcgctttggtgttcctgttattgctgatggaggaatccaaaatgtgggtcatattgccaaagctttggctcttggagcttctacagtcatgatgggctccctcttggctgccaccaccgaagcccctggtgagtacttcttctcagatgggatccggctaaaaaagtaccgtggtatgggttctcttgatgccatggacaagcatctcagcagccagaaccgatatttcagtgaagctgacaaaatcaaagtggcccaaggagtttcaggagctgtgcaggacaaagggtctatccacaagttcgtcccttatttgattgctggcatccagcattcctgtcaggacattggtgccaagagtttaacccaagtcagagccatgatgtactctggggaactcaagtttgagaagagaacatcctcagctcaggtggaaggtggtgtccacagccttcattcgtatgagaagcggcttttctgaaaagagatccagtatatgccttgaat

SEQ ID NO: 1777 - DNA, 564 bp, Cricetulus griseus
  misc_feature (249)..(263): n is a, c, g, or t
agacaagtgtgctgatcatttccaattaaaataattttgacacagttgatttacaaaggccattgggaaaattcagagaggtggaaggaaaaacttagctttaaaacctgtgtgccattgtgagttacttgatcccgtaactcttgacgccttctctttataaatccaagcttggataccagtcctgggaacttctctgctaaagagtccctgactattcacataaaggccataattttcataccattnnnnnnnnnnnnnnntttttgatgagtttattttactgtttttgttgttgttgttgtttgtttaattcctggtgctctattgtcacctcctctgaccttttaatgtgtctgttgcagtttggggttaagactttttatcattactttttcatttacttggctgtacatttgcttttttcacaaacacctaagctgccctgctgcttgcaaggctacagggcctgggcaggctcccctcagcagcgattcaaccactgtgcgccttccctaccgtgcttgctctgtctcacactagtcacaatcttgttttaagtgc

SEQ ID NO: 1778 - DNA, 531 bp, Cricetulus griseus
aacttgataggatctctaggtcctacttaaatagccattccatcccatctagatccacggagaactgtgtgataggctatgaccgaaattaaagcgggatgctttacattaagatatgcaagtttatgtagagaaaacaaatactatagactctataatgttcttccacctaactagtatttaattatgtggatttcttttatactacaaaagattgtttgagtttgtctttttgatactgatgcaattgtttggctgttcttacattctgtctgctgctgcctgttgtctcacattttgacccattgtgttaagaacctattgtgctcctttgtaatcaaaaaattgggggggatgctaattgaatatttgaaaaataagtataaagtgtttgttactcaaaattttatacatttgtaaattctaattacatatgtgaatggtaatagtctcagtgaattgattattggttgcaaatgcccctggcagtaatattggatgaaactttctttaaggcagaagacattacct

SEQ ID NO: 1779 - DNA, 114 bp, Cricetulus griseus
atttcatctggatttgattacttaattcaaagaccatattttagctggccatataaccaagaagctatcagccagaaaacttgaaagttataagcatttcttgaaaataagatt

SEQ ID NO: 1780 - DNA, 490 bp, Cricetulus griseus
  misc_feature (242)..(265): n is a, c, g, or t
agcgggcgccgagaaatggaccaattttgacaagatgtagtgctgcagcgtgcgtgatcagacatgttcagtcatggcatccgaactttgtaagacgatctctgtggccaggcttgaaaagcacaagaatttgttcttaaattataggaatttgcaccatttcccattggagttattgaaagatgaagggctgcaacatctggagaggctctatatgaaaagaaactcactcacaaccttgnnnnnnnnnnnnnnnnnnnnnnnnccaaaccttgtggaactgtaccttcattcaaataacatagttgtggttccagaagccatcgggtcccttgtaaaactccagtgtttggatctcagtgacaatgccttagagattgtttgcccggaaattggtcgtctgagagcattacgtcatcttcgattagctaacaaccaactacaattcctacctccagaggttggcgatttgaaggagctgcagacacta

SEQ ID NO: 1781 - DNA, 470 bp, Cricetulus griseus
gaccacttctggtgggaccgactatggctgcctgtgaacttaacctgggctgatctagaagacagagatggacgtgtctatgccaaagcctcagacctctacatcacacttcccctggccttggtctttcttgtcattcgatacttctttgagctttatgtggctacacccctggctgccctcctgaatgttaaggagaaaacccgactacgagcacctcccaatgtcaccttagaacatttctacctgaccaacggcaagcagcccaagcaggtggaggttgagcttttgtctcggcagagtgggctctctggccgccagatagaacgctggttccgccgccgccgcaaccaggacaggcccagccttctcaagaagttccgagaagccagttggagattcacattttacctgattgcctttgttgcgggcatggctgtcattgtggataaaccctggttctatgactt

SEQ ID NO: 1782 - DNA, 555 bp, Cricetulus griseus
cttcggcaacataggggcagcccatgcatgtcagcctgtatcacagaaggaaaagcgccaggtgcctgtgtctgcgccgatctgaagagctgtgcatgcagtatagcaggccaaggtctgagccacagcagcatttttatttgagattttgataactgtttatatgtgttgaaaaccaaaatgacatctttttaaagcttgtccataagtaaacatagatgtcttttatagtggaaaaaacacgtggggaaaaaaatcatctattttgatgcagcgtttgataaatgataaaacacccgacacctcactctttatactgcacagaatgaatgaggaggtctgggctggggagacgaaggtcaatgctgtttttgttttcttttaggatcattcccttttaccagcttttaaccgtctgatacccatagcaggcaaactctcctagttaacatagttaagttcagcacttgtctcgtttaatgtcaaggtttgcattttctacgggcagtctccttcctcacaaacccactgtgcaggtgctattgttgctcttag

SEQ ID NO: 1783 - DNA, 510 bp, Cricetulus griseus
caaattggtggcaggctagccatgtgaaagagggaggaagtgctggtctgatcccaagccagttcctggaagagaagagaaaggcatttgttcgaagagactgggacaattcaggacccttttgtggaactataagcaacaaaaaaaagaagaagatgatgtacctcacaaccaggaatgcagagtttgatcgtcatgaaattcagatctatgaggaagtagcaaaaatgccacccttccagcgaaaaacattagtgttgataggagcacaaggtgtgggcagaagaagcttgaaaaataggttcatagtgctgaatcccgctagatttggaacaacggtgccatttacttcacggaagccaagagaagatgaaaaggatggacaggcatataaatttgtgtcccgatcagagatggaagcagatattaaagctggaaagtatttggagcatggggaatatgaaggaaacctctatggaactaagattgactctattcttgaagttgtac

SEQ ID NO: 1784 - DNA, 282 bp, Cricetulus griseus
agatctggaaatggaccccaactgctcctgctccaccggcagcacctgcacctgctccagttcctgtggctgcaaagactgcaagtgcacctcctgcaagaagagctgctgctcctgctgcccagtgggctgctccaagtgtgcccagggctgcgtctgcaaaggggcatcggacaagtgcacgtgctgtgcctaatgggaggacgatgccgcctcccacgtgtaaatagtgcccggagctctaccctgtttactaagtccccttttctacgaaatatgtga

SEQ ID NO: 1785 - DNA, 578 bp, Cricetulus griseus
aagatccaggatgtcggccttatgcctatgggtggcatgatgcctggtgcagtccctgctgcagcagcagcagcccctgaggtggctgagggagaagacatccttaaacagaaagagcggacacacttcactgttcgcctaacagaagcaaaacctgtggacaaagtgaaactgatcaaagagatcaagaactatgtccagggcataaaccttgtgcaggccaagaagctagtggagtccctgccccaggaaatcaaagcaaacgtcgccaaagccgaggcggaaaagatcaaagcagccttggaagcagtgggtggcactgtagttctggagtgacactctctttctgaggactttcggactggggtccctgggacctgggcaaaggcctgctcacccctgcttcactcccaggtggcttgttgggagcaacagctgctgacacttggtgaccgaattctcctgggagagggacaggatggacctactgtgatggggaggggcagtttacagcctgtgcagactctcaagagattgccttgagatgctataaagtgaacagccctggaggcgactaa

SEQ ID NO: 1786 - DNA, 561 bp, Cricetulus griseus
  misc_feature (441)..(455): n is a, c, g, or t
ttcagactggacagggtggtccctggttcccactatgtagctctgactggaatgctgtcagcttctatcaccgttggtgttacgtatccctgatcacctggtggagcctctaaagagaagaattactacactcatggctggcattttacgctcagtatttcagaagcctccaggcagactgcagactgtgaataaaggtgtggagtctctcattggtacagattggattcgtcacaaatttaccagatcaagaattccagataaagtgtttcagcctagccctgaagatcatgaaaaatatggtggggacccccagcatcctcataaactgcacattgtcacaagaataaaaagtacaaaaaggcgtccatactgggaaaaagatacaatcaagatgcttggactacagaaggcacatagccctcaaattcacaagaacannnnnnnnnnnnnnnaaaagttgaaagtggttaaacacttgatacgaatccagcccctgaagctgccacaaggacttcccacagaagagaccatgtctagcacgtgcctcaagagcaatgg

SEQ ID NO: 1787 - DNA, 483 bp, Cricetulus griseus
agccgatgatgctcaggaggccaagggaaataaatgtagccactttttccagctaaaaaacatctctttctgtggatatcatccaaagaacaacaagtactttggtttcatgaccaagcaccctgctgaccaccggtttgcctgccatgtctttgtgtctgaagactccaccaaagccctggcagagtctgtggggcgtgcatttcagcagttctacaagcagtttgtggagtacacctgtcctacagaagatatctacctggagtagcagtgccaccaccctctgcagccctctgccccaggccagtactaggacagctggcaacggacaggatgtggcactgccacaagagaatgggggagtgagggctgtttcgggggggcaggggtatggggagaagcagatgcagtttattgtaatatatggggttagattcatctatggaggacagtacaggctctctggggactggtgaaaggtca

SEQ ID NO: 1788 - DNA, 513 bp, Cricetulus griseus
acgccgagtctcttcggcaggctcgccggggacatgacggggtacacaccggatgagaagctgcggctgcagcagctgcgggtgctgagaaggcaatggctgaaggaccaggaactgagcccccgggagcccgtgttgccaccgggcaagacgtggcccctggagacattctggaataactttctgcgggacggggccctgtggaagaaagtgatctttaagacataccgggccagtctcttcactgtttctcatgtaattatacctctgtggtttattcactattacgtcaaatatcacgtagctaaaaaaccatatgccatcgttgacacgaagcccaaaatattcccaggtgatacaattctggagactggagaagtaattccgccaatgaaagattttcctgatcaacatcattaaagagcacttaaaacttaaaagacttgtgtaacagcaaaagtctcttcatatagttcgtatttactgaatctgtttcctggaaaagtaactaat

SEQ ID NO: 1789 - DNA, 383 bp, Cricetulus griseus
  misc_feature (86)..(103): n is a, c, g, or t
agaaccatccatatgctgagacatctaccagggacccagttttgctatagagagtaaatggacactggtgtaatcccttacaaatnnnnnnnnnnnnnnnnnnttctgaatgatgtaatatttaaagttatactatgcttgtttgaacatggtattacacttatcaaaaatcttggcagtttaagatttattaaagtgtattatgtgcaagcattccgtagtttaataaaactattgtttgttctttaatgttaaaaacactgatccttaaaatatgattttttttattttcatagatcatttatttcaaaatggatgaaatgaatggcctttcaggcttagggacatagttcataagtagagtagttgccaaggatgtgtga

SEQ ID NO: 1790 - DNA, 554 bp, Cricetulus griseus
gaaggatcttcgtggggaacagccaggtgcccgtggtgtttgagaacactgacctacactcctatgtggtgatgaaccatggacgctcttacacagccatcagcaccattcctgaaactgttgggtattctctgcttcccctggsrcccattggaggcatcattggatggatgtttgcagtggagcakaaygggttcaagaatgggtttagcatcactgggggcgagttyayccgacaagccgaggtgaccttcttggggcacccggkcaakctggycctgaagyarcactycaktggtattgackaacacggacacctgaccatcaacacagaactagacggccgagtgccacagatcccctatggttcttcagtgcacattgagccctacacagagctgtatcactactccagctcagtgatcacttcctcctccaccctggagtacacggtgactgatcctgatccggacggcactgcaccctcacacacccatgtttaccagtggcgtgagaccattacctttcaagagtgtgtccatgatgacttcatg

SEQ ID NO: 1791 - DNA, 402 bp, Cricetulus griseus
  misc_feature (339)..(367): n is a, c, g, or t
cactgctacaaggtccatgaccgaaatgctactgtagataagctggaggacttcatcaacaatatcaacagtgtcttggagtccttgtatattgagataaagaaaggaatcacggaagatgatgggagacccatttatgctctggtgaatctttctacaacttcagtttccaaaatggccacggattttgccgagaacgagctggacctgtttagaaaggctttggaactgattgttgactcagaaactggctttgcctcttctacaaacattttgaacctggttgatcaactcaaaggcaaaaagatgaggaagaaggaagcggagcaggtgctgcannnnnnnnnnnnnnnnnnnnnnnnnnnnnacaaggagggggagttcaccttgcatggccgggcc

SEQ ID NO: 1792 - DNA, 349 bp, Cricetulus griseus
  misc_feature (254)..(275): n is a, c, g, or t
tttatagtaactatgcagaactatagccaaagttagtgtagaaataatatgaaactacagagcattcatgtctcaatgttgaatcagtttcattttaactctgaagttaatttcttagggcatcatttgggctagtttctgtgtaagtgtaaatactacaaaacttatttatactgttcttatttgttacattcatagatttttatgacatctggctaaaagcaaattattgcaaaactaaccaaaccactatnnnnnnnnnnnnnnnnnnnnnncaaaaatgacatttttatattaaattgtttggctctgacaaaaattaaaggagctgacactaataaaggaatat

SEQ ID NO: 1793 - DNA, 470 bp, Cricetulus griseus
caaacacgaagacaagaggatgaggtcaagaagtaaagacagggatcatgagactattaaagaaaaagaaaaacaggtggattctaaagggaaagatcaggaaaggagtagaagcaaagagaattctaaacaggtagaatcaaaaagtgatgagcatgatcatagcaaaagtaaagaaaaggatagacgtgcacagtctawgagtagagaacgtgatctaactaaaagtaaacacagttacaacagtagaacaagggagcgaagcagaagcagggacaggagcagaagagtgcgctctataagccatgacagagatcgcagcagaagcaaggagtaccacaggtacagagaacaggagtataggagaagaggaaggtcacggagccgggatcgaagaactccaggacgatcaagaagtaaagacaggaggagaagaaggagagattcccggagctcagaaagagaagata

SEQ ID NO: 1794 - DNA, 1319 bp, Cricetulus griseus
  misc_feature (321)..(338): n is a, c, g, or t
  misc_feature (381)..(402): n is a, c, g, or t
ctatgtgttttgttaccgctgtgtgtttaattatgtgaggagtcatcaagcctgtcccatcacaggctatccgacagaagtccagcatctgattaaactctactctccagagaactgaaagaaattagcctattatcacacagctcaagttctgtactgtaaggccacaagactgctgtggtatggcaaacattgatacttccctaattcacaactacagtaattttcagtaactatggattcctttaaaagtatatagccactcggagcgttggtggcacccgtctttaatcccagcaccctggaagcagaagcaggctnnnnnnnnnnnnnnnnnnaccagtctggtctacagagcgagtgccaggataggctccaaannnnnnnnnnnnnnnnnnnnnngggggagggggagaaggatatagccacttgatcctaatgttttgatttgctctctagcaagctggttaagcaggagaattgggattgcaggtggtgtgagggccagtgtggaggtggattaaagaagaccactaagtgttgcttgtcctcaagagtggggttttcagctgaatgtggtcgtgtcatatctgcactcaggaagcaggattttgagttcaaggacagcttaggccaccatagggagcctgtcaaaaaagtaaaaagataaaagtaaaaagaaagtgagagactatgattaagagggataaaaagctcacaggaaaacccaggtcagaccttatacaacaggtggtttgagaaataggccttctctttaaaaaatatttctttacctgtgaagtgtagaggctttgtcagatggcatacactatgaaatgacttcctctttctagaaatatttagggacattttagagaaacaaccccttccatataccagacttactaacatttgattatcaaattaacaaatgctaattgtcagcatttggagattccttcatgagccatacctgtctctcttgggaaacaggttaaagaaaaatagggtttgttaatggggatgagtctggaaatttcaatgtgaatgaaagctagcaagcaatgatgagatgtacgaaaatacttatctaatgtttaccaaatgcttatctaatgaacatttaatgaggagcaaaagctttctacttgctcttatgagttttctcaattgacagtttgctcaattgacatgaatcacccagggtattatgaaagtttctatgaaacatttaagtaaattttaacaatacatgattctgggaaagaactgttcatgctggcacgattatgtggaaactcaaaagattactccagggg

SEQ ID NO: 1795 - DNA, 206 bp, Cricetulus griseus
agaagaccatagcagccctcctagtgaagtgggctgcaagaagaagaagggtaaagttcttagcagaaacagtgctgatgatgaggaactgaccaatgatgggctgaccctatctcaaagcaagagtaatgaggactcgctgattcttgagaagagtcaaaactggagttcccaaaaaatggaccatattctgatttgctgtgttt

SEQ ID NO: 1796 - DNA, 1329 bp, Cricetulus griseus
tccctgaagacatataagtggcagggcctctggaacattccaacctacaagggcaagatgaagaggattgcttttcagttcacgccctacagctgggtacgctttgagtggaagccagcctccagcctgcaccgctggctggccgtgtgtggcatcatcttggtgttcctgctggccgagctgaacacattctacctgaagtttgtgctgtggatgccccctgaacactacctggtcctcctgcgcctggtcttcttcgtgaacgtgggtggtgtggccatgcgtgagatctatgacttcatggatgaactgaagccccacaggaagctgggccagcaggcctggctggtggcggccatcacagtcacagagctgctcatcgtggtgaagtatgacccgcacacactcaccttgtcactgcccttctacatctcccagtgctggactcttggctccatcctggtgcttacgtggactgtctggcgcttcttcctgcgggacatcaccatgaggtacaaggagacccggcgacagaagcagcagagtcaccagggcagagccatcaacaatggggatgggcacccagggccggatgatgacctgctagggactgggactgcagaggaagaggggagcaccaatgacagtgtacctgctgaaaaggagggggcctcagccgcctcatgatcctctccctctttactggccttatgcctgccatagggctgtcccatttctcccgtccttatgctccctgcttcagaggaggtggggggcccattcccaactccaccaggggcacctgagtgtacatgtttgtgtgcaggtaggtgtgtgcacatattggctcctgacacgtctccagggctgtgagctcctcagtgagcctggagcttgctctagagcaagggtcctgccctgtccttctacctggtcagccaaggcactggcccatggtctctcctgtgttcagtctcagcacaggccaggagaggcatgtcagtactctttctctaccctctgtggggcaaacagaagccccatgcaccctgtggcctcacccaacttgcagcagcagaagtgaaggatgttacaacaccaagatggtctcaaagtggtgggtctggagtcagtactgagctgtggcctttggagccttctttaaccaggactctaagctgagggtgtgtaatggagggggtcaccagatgggcctcttgagggatatcaagtcagagagtccaacttggagacctgtataccacaggtgctagggttgtgttgtcaccatggctcccagagtttatagtcatattcttgagcaaacag

SEQ ID NO: 1797 - DNA, 512 bp, Cricetulus griseus
caaaggccgcaagttctacgggccggaggggccatacggggtctttgccggaagagatgcatccaggggccttgccacattttgcctggataaagaagcactgaaggatgagtatgacgacctttctgacctcactgctgcccagcaagagaccctgagtgactgggaatctcagttcactttcaagtatcatcatgtgggtaagctgctgaaggaaggggaggagccgactgtgtactcagatgatgaagacccaaaagatgagaatgctcggaaaaatgattaaagcattcagtggacgcatatctatttttgtattttgcaaaatcatttgtaacattcgagtctgtctgtctttaaaacatagtgatttcaatatttagaaaagttttgaacttgctgtaattttttgttaattaatatcactagtgacactggtaaaattgtcttagaatgcatgatacgtttgtgtcacaaatccaagaagtgaactgcagtgctgccatgcaact

SEQ ID NO: 1798 - DNA, 306 bp, Cricetulus griseus
tacaaatcatgacttcacttggctggaattttttaagtttttgtttgtttttacttttttcctcctagcttatcacttcattttcctcaatttagtatcattgatgatcctgtgcttatcatgttagggccattatacctcacgaataacaagttggtaactaaccacacttgaattaaccacgcagtcacagtcagctcatctcttaaaactgtccaaatttgagtctaataagaaccctaaaagcacaatgatacatgaagagttgagcttaaaacagccttgctgagatacattggcatgttt

SEQ ID NO: 1799 - DNA, 299 bp, Cricetulus griseus
tcggagagacccatccggagtcctatcggcggagacccctgtgcggtccggagggggcggcggccccgactctgacccgcgccggggggtgggccatggcggaaatcatcgacctggggcgggagatcgagcaactgcggcgctgcgagctcatcaaagagagcgaagtcaaggccctttgcgcgaaggccagagagatcttggtagaagatagcaacgtgcagagggtggactcgccattcacagtatgtggtgacattcatggacaattctatgacctcaaggagcttttcatatta

SEQ ID NO: 1800 - DNA, 440 bp, Cricetulus griseus
ctgctcaaggtgtgaacatgaatagactaccaggttgggataaacattcatatggttaccatggggatgatggacattcattttgttcttctggaactggacaaccatatggaccaacttttacaactggtgatgtcattggctgttgtgttaatcttatcaacaatacctgcttttacacgaagaatggacatagtttaggtattgctttcaccgacttaccgccaaatttgtatcctactgtggggctgcagacaccaggagaagtggttgatgccaattttgggcaacatccttttgtatttgatatagaagactacatgcgggaatggagaaccaaaatacaggcccagatagaccggtttcccattggggatcgagaaggagaatggcagaccatgatacaaaaaatggtttcatcttatttagtccaccatggg

SEQ ID NO: 1801 - DNA, 572 bp, Cricetulus griseus
aagtcaagcatttctgtcccaatgtgcccatcatcctggttgggaacaagaaggatcttcggaatgatgagcacacaagacgggagttagccaaaatgaagcaggagccggtaaaacctgaagaaggcagagatatggcaaacaggattggcgcttttgggtacatggagtgttcagcaaagaccaaagatggagtgagagaggtttttgaaatggccacgagagctgctctgcaagccagacgtgggaagaaaaaatctgggtgcctcattttgtgaagccttgtgcaagcacagccctcatgcggttaattttgaagtgctgtttattaatcttagtgtatgattactggccttttcatttatctataatttacctaagattacaaatcagaagtcatcttgctaccagtatttagaagccaaccatgattattaatgatgtccaacctgtctgaccagccagggtctttctgacactgctctaacagctctctctgcactccacctgacaccaggcgctaagtcaaagaatttcttaacttcttgcttctttctagaaagagaaacagt

SEQ ID NO: 1802 - DNA, 542 bp, Cricetulus griseus
agaagaaaccatgcaggcatttctaaaaggcacatctgtcagcactaaaccacaattcaccaaggaccgggcaatacctacaggaagcagtggagaaaccaagaaagtcaagccagttccttgggtggaaaaatagtaagaattatccatatttttgttgaaataactaagtttcctccctaatcttttatagtccactggatttttgttttgttttaatgtaagggagatttgtggtatttagatgctactacctttggggggtacagtttgggggggtcttagatacagaaatgaaaacgtttctgtgagctggttataaatagtagtcctattgaaatctagattctggccctcttttattattgtatactggaaattgttggggttttgtttggttttagtatataaaaggtttgaagtagcactaaattgtcagctaagtgatactagacgtaattgtaaccattagctagatgtattctctgattatcgagggttttcaggttatttacaagccaaacaaggtcctaataaatgac

SEQ ID NO: 1803 - DNA, 357 bp, Cricetulus griseus
agtgttgcactgtaatctatcatatagagctatatgtatggaaatttttgatcagtttttttaagagatgtatcctgtttgcaaaggcacaataaaattgcatcttctagattataggcaataaaggtaacaataaaccttacttaaatcatactgatactctctgctcatttgattttttgggggaaaaaaagtctaacatatccagtagtttcagggatttcatttaacttaaaaattctgatatatttaatttataaatttcggacttatataatagagtttggaaaactataagaaatgctttgttaatgtgtgtattcctatgtaaaacacatggcttctcccgtgtatatt

SEQ ID NO: 1804 - DNA, 500 bp, Cricetulus griseus
  misc_feature (334)..(350): n is a, c, g, or t
tccgtcaccgcgaggctcagattacactgtgcacccaccatgagtcttgacatccaktgtgagcagctgagtgatgccaggtggacagagctccttcccctgatccagcaataccaagtggtcaggttggatgactgtggtctcactgaggtgcggtgcaaagacatcagctcakccattcagtccaaccccaccctaacagagctcagcctatgcaccaatgagctgggggaccctggcgtgtgcctggyactccasggcctgcagaatcccacctgtaagatccagaagctaagcctgcagaattgcagcttgaccgaggctggctgtaggnnnnnnnnnnnnnnnnnacgttctttacctaccctgcgggagctacatctcagtgataatcctctgggagatgcaggtctgaagctgctctgtgaaggacttctggacccccaatgccgccttgagaagcttcagttggaatactgtaacctcacagctaccagttg

SEQ ID NO: 1805 - DNA, 497 bp, Cricetulus griseus
atcgatcagaacagagctttagtcgatggaccttgcactcgggtgaggagacaggccatgccttttaagtgcatgcagcttactgacttcatcctcaagttcccacacagtgcccgccagaaatatgtacggaaagcttgggagaaagcagatatcaatacgaaatggtcggccacaagatgggccaagaagattgatgcccgagaaaggaaagccaagatgacagattttgatcgtttcaaagtaatgaaagcaaagaaaatgaggaacagaatcatcaagactgaggtcaagaaacttcagagagctgctatcctgaaagcttcgcccaaaaaagctcctgttgctaaagctgccattgcagcggcagcggctgcagctgcagctgctaaagctaaagttccagccaagaaggggacagcaccaggcaagaaggctgcaggccagaaagctgcaagccagaaagctgcagctcctgctaaaggtcagaagagtca

SEQ ID NO: 1806 - DNA, 99 bp, Cricetulus griseus
ggacgggtccatacggagttgttcttgatttccgtcgttacttataagggaaacttacacaatgtcgcggaaccctagatgtcctgcagtatgaaggat

SEQ ID NO: 1807 - DNA, 500 bp, Cricetulus griseus
cagtacctgctggtcacggcgctctacatgctggaaccctgggagcggaccgtgttcaattcaatgctggtttctgttgtggggatggcgctgtacaccggctatgtcttcatgcctcaacacatcatggcaatactgcattactttgagattgtacagtgacgaagatgtgaccaggatccagaggttcctggggaagatccaccttatgaagctggaatgagacctcatcagactaagatgctctacagatgttaacataaccaaccttataagttaacaaagactgaaattcatgagtagaacaggaaaatcatcctgactcatgtgttgagttctttctttttgatcataaaagaggctcttatatagtagcttttgcctattttaacattgtagtcattcgtactgagatatcagtatttctctaacctttgagactgtttcaatattctccagtgaaagcttctcttaatgaaactctgagtacatcttaattg

SEQ ID NO: 1808 - DNA, 370 bp, Cricetulus griseus
ctatttgacaattattagtgtgaccaaagtattaggcagttttcatacattttccaccttgtacaaaattctgaattcatttttcttccaggttggcacagagctgtcgatgggaaagccctctgcgtattattttggttgttctgacttagcaaagtgattttgaataatacttggtgttcttttataacccacttttgattggtaactgttttctgtattgttgcaggcggatcaaatgagtgagtcttggtggagatttaagtatttattgctacagcttagttgatgaaattgctgttcttgtaaagccatatgttctgttaggtcctgcttgctcagagcgtttctttctacaggtgaaacacta

SEQ ID NO: 1809 - DNA, 337 bp, Cricetulus griseus
gtgctggacctggatttgtttcgtgtggataaaggaggggacccagccctcattcgagagacgcaggagaagcgcttcaaggacccggggctggtggaccagctggtgaaggcggacagtgagtggcgacgatgcaggttccgggcagacaacttgaacaagctgaagaacttatgcagcaagactattggtgagaaaatcaagaaaaaagagccagtgggagatgacgagttcatcccataggacgtgttgaatttcgatgaccttactgcagacacgttatctgccctgaaagtctcacaaattaaaaaagtccgactcctcatcgatgaagcca

SEQ ID NO: 1810 - DNA, 170 bp, Cricetulus griseus
tcagctacacctagatagacataaattaataaaaatcgtcttaaccaacttatctaataaaaattggcaaccagccactattttgttgactatgagaaagtttaagtttatgttaatttttagggtctgatagatattcatgtgtattacagtggtattcatatgctatg

SEQ ID NO: 1811 - DNA, 524 bp, Cricetulus griseus
  misc_feature (133)..(147): n is a, c, g, or t
cgggttatagctttgcagtatccagtttattgggaccatcttgaattctgtgatggattcagaaaacttttagaccacttacagttggataaagtccatctgtttggggcgtctttgggaggttttttggctnnnnnnnnnnnnnnntacactcacaagtctccaagagtccactccctcatcctctgcaatgccttcagtgacacatctatcttcaaccaaacgtggactgcaaacagcttttggctgatgccagcatttatgctcaagaaaatagttcttgggaacttttcctctggcccagtcgacccaatgatggcagatgccattgacttcatggtggacaggctagagagtttgggtcaaagtgaactggcttcaagactaactctgaattgtcaaaattcatatgtggaacctcataaaattcgggacatccctgtaaccatcatggatgtgtttgaccagagtgcattgtcaacggaagccaaggaagaaatgtacaaactgtaccctaatgcccg

SEQ ID NO: 1812 - DNA, 578 bp, Cricetulus griseus
caaccgggaagagcaagaggagcttatggactttgaaagagatgaagagcgctcggccaatggtggctctgaatcagatggggaagagaacattggctggagcaccgtcaacctggatgaagagaagcagcaacaggatttctctgcttcctctaccaccatcctggatgaggagcccatcgtgaacagagggctggctgctgccctgctcctgtgtcagaacaaagggctgctggagaccacagtgcaaaaggtggcccgggtgaaggctcccaataagtcactgccctcagctgtgtactgcatcgaggataagatggccatcgatgataagtacagccggcgggaggagtacagaggcttcacccaggacttcaaggagaaggatggttacaagcccgatgttaagattgagtatgtggacgagacaggcaggaaactgactcccaaggaggccttccggcagctgtcccaccgcttccacgggaagggttcaggcaagatgaagactgagcggcggatgaagaagctggatgaggaggcgctcctgaaaaagatgagctccagtgatacgcccc

SEQ ID NO: 1813 - DNA, 1251 bp, Cricetulus griseus
  misc_feature (769)..(796): n is a, c, g, or t
aagcattatgacagggccaaggagctagaccccaccaatatgacttacataactaatcaagcagctgtgcactttgagaaaggtgactacaacaaatgccgggagctgtgtgagaaggcgattgaggtgggcagagagaaccgagaggactaccgacagattgccaaagcttatgccagaatcggcaattcctatttcaaagaagaaaggtacaaggatgctatccatttctacaataagtctctggcagagcacagaactccagatgtgctcaagaagtgccagcaggcagagaaaatcctgaaggagcaagagcgactggcctatatcaaccctgacttggctttggaggagaagaacaagggcaatgaatgcttccagaaaggggactacccccaagccatgaagcactatacagaagccattaaacggaacccaaaagatgccaaactgtatagtaaccgagctgcctgctacaccaagctcctggagtttcagctggcactcaaggactgtgaggagtgcatccagctggagccaacctttatcaagggttacacacggaaagcagccgccttggaagccatgaaggactatacaaaagctatggatgtgtaccagaaggcgctagaactggactccagctgtaaggaggcagcagatggttaccagcgctgtatgatggcacagtacaacagacatgatagccctgaggatgtgaagcgacgggccatggctgaccctgaggtgcagcagattatgagtgacnnnnnnnnnnnnnnnnnnnnnnnnnnnntgcaaaaggatccccaggctctgagcgaacacttaaagaaccccgtaatagcacagaagatccagaagctgatggatgtgggtctgattgcaattcggtgataacttgcttttcccctcttcccttcgccaatgtggaaaggcgagctgggacggtggcgagcagcactgggcagagggggggggaagaaaggcttatctttatatttatacatgcctgcaaggaagacagactcatccagcgccacctcggaccctctcagcacacgcatggtctcttcactgctgcccttgagtgtccttccctgtcctacccaaacacccccacccccctgccccacccccgtcactgtctcggctgctcccctatagttggttattttttatttggggcagtgggttcatacggggaggggagggaattcttccctacctggggtcccagctgtcttcact

SEQ ID NO: 1814 - DNA, 542 bp, Cricetulus griseus
gaagggaattccaacctgtagaactttgggggtcctatggtcgggttctccccggcgactgtgcatggtgaaaggggcgggacctctgggggctcgtgggggcgttgggggttcgcagggtgaggaagggggtgtcaagtgagagagagctcgtgcaggacttccaaacttaraaccttgaggccctcggggctcakgtccagggaccgggcgctcgggccgccatgcgcgacaggacccatgakctgaggcagggggacaacagctcggacgacgaagatgaggctcgagtcgcgctggtggtgcacccargtaccgcccggctgggcagcccadatgacgagttcttccagaaggtccaggcaattcggcaaactatggccaaactggagagtaaagtccgggagttggagaaacagcaggtcaccattctggccacgccccttcccgaggagagcatgaagcakggcctgcagaacctgcgcgaggagatcaaacagctggggagagaggtccgggcacagctaatagccatagagcct

SEQ ID NO: 1815 - DNA, 1017 bp, Cricetulus griseus
  misc_feature (839)..(856): n is a, c, g, or t
acttgaatgtcagctgaagacagaaagggatgagaaggagctttataaggtgcatttgaagaatacagaaatagaaaatactaagcttatgtcagaggtacagactttaaagaatttagatggaaacaaggaaagcatgattgtacaggtgaaagaagagattgacaaactgcagtcaagtttggttgaaaaggaaaatttgtacagggctctcctgcttacagcctcaaataaagaagatacaatatttttaaaggagaaacttcgtaaagcagaggagcaagttcaagcaacacggcaagaagctatctttctagctaaagaactcagtgatgctgtgaatgttcgtgataaaacaatggcagacctacatactgcacgcttagaaaacgagagagtgaaaaagcagctagctgatgctgtgagaaaagaccaggaaaagactgatacaatggagcatgaactgagaagagaagttgaagatctgaaactccggctccagatggctgcagatcattacaaagaaaagtttaaggaatgccagaggctycaaaaacaaatcaacawactttytgaccagtcagccagtactaacagtgtcttcacaaagagaaatgggagtcagcagaaagtgaatgatgcttcaataaacacagacccagccacttctgcttctgccatggatgtaaagccagcagtgtcttctgcagagataaattttgacatgttaacaaaggatcatgtctgtgaaatgaccaaagaaattgctgagaaaacagaaaagtataacaaatgtaaacaactgttgcaggatgagaaaaccaaatgtaataaatatnnnnnnnnnnnnnnnnnnatggagctgaagtggaaagaacaagtaaaaattgccgaaaatgtaaaacttgaactagctgaagtagaggacagttacaaactacaattggcagagaaagataaagaaataaatgggctggcctccaatttggaaaatctctcaagggagaaggaacttat

SEQ ID NO: 1816 - DNA, 389 bp, Cricetulus griseus
caagtggatgctttgggaattacgcactttgaaaagcatccacagtttactccttagttggctatggacttgatgaaattaaatggtgagcctttataacgcattctaagatgaggagattgttagtgatgagatctaaaaatacacacagatttggcttttctattgtttacaacaatattcagcttaagtatttattctggctgagtgtgatttaaattagacatttcaccagtgtagtttactgtgtggataaagaactacttcagccttagcaagtggatttggcagtatgttttttacaaagaacttttcttctcttgtacatagactatatataagtactatttatgagtataagaaagcatagtcctattttctgtaactga

SEQ ID NO: 1817 - DNA, 385 bp, Cricetulus griseus
ggcttatttctctccaactttaaggttatttgtgagctttaacatcgcctggctggagacagacatctgattagcttgaaaaactacagcagtagactgattcaatcaagatatttgtgtattgttgtgttctatgtccactttctgtgctattcctatatccctgtatctctgaaacactggaagagctagtaaattgtaaatgaaataccatgtttcccttgaatttcatttctcagtgtggcaactgtgaaaagtgctgtgaattttctgttttgatacagtggtgatggaaatttaacccctatgaatctgctgttgatgttgtatgatagaaaattggcctccctgaagcttgattgtataaatctgcacccaagagaaa

SEQ ID NO: 1818 - DNA, 1081 bp, Cricetulus griseus
gcacgagctttttcctggtttccacccggcgccaggtgacacacacagagctgccactatggttcatcaagtgctctaccgggctctggtctccactaagtggctggcggagtcgattcggtctggcagcctggggcccggcctgcgggtgttggacgcatcatggtactctccgggsacccgccaggcccgcaaagagtaccaggaacgccacgtgcctggcgcgtccttctttgatatagaggagtgccgggacacgacttcgccttatgagatgatgctgcccagygaggcscacttygssgactacgtgggcagyctgggaatcagcaacgacacacacgttgtggtgtacgacggakacaacctgggtagtttctatgcacccagagtatggtggatgttccgtgtgtttggccatcgcacggtgtcagtgcttaatggtggcttccggaactggctgaaggagggccacccagtgacatctgagccctcacgtccagagccagccgttttcaaagctacactggaccgctcccttctcaaaacctatgagcaggtcctggagaacctccagtctaaaaggttccagctggtagactcccgtgcccaaggacggtacctgggcacagaaccggagccggatatcgtaggactggactcgggccacatccgaggttcagctaacatgcccttcatgaacttcctaaccgaagatggctttgagaagagcccagaggagctgcgtgccatattccaggacaaaaaggtggacctttcacagcccctcattgccacatgccgcaagggggtcactgcctgtcatattgccctggctgcctacctctgtggcaagcctgatgtggctgtttatgacggctcctggtcggagtggttccaccaggcacccccggagacccgcgtgtcccagggaaagagtgggaaggcctgagtgtgcacagcctcctctgcacaccaacttcagttagttcccttaagagaggccagtgtgatctgtcacagcttcacacctcttaggcaatgaagactgacaggattttagaattgctgtgagtgcctc

SEQ ID NO: 1819 - DNA, 164 bp, Cricetulus griseus
atgtcatcagaatccagcaaaaaacggaaacccaaagtgatccgaagtgatggaaccccaagcgaagggaaacgaaatcgatctgacactgagcaggaaggcaaatactacagtgaggaggctgaggttgacctgcgggaccctggcagagactatgaattgtg

SEQ ID NO: 1820 - DNA, 132 bp, Cricetulus griseus
tgctgactcttgcagcaccgagctcatgaggagagtccggcgcttccagatcgcccagaacaaatgcctggtcatcaagtatgccaaagacacgcgctatagcagcagcttctccacacatgaccggtcagt

SEQ ID NO: 1821 - DNA, 372 bp, Cricetulus griseus
caaatgggtggcaagtgcctccctatggtgtatatgggcagccatggaaccagcaaggatttggagtagatcaatcaccttctgctgcttggatgggtggatttggtgctcagcctcctcaaggacaagctcctcctcctgtaatacctcctccaaaccaagctgggtatggaatggcaagtttcccaacacagtgagctgggactctaaacacaattgtaactcaccataggctgcagtttcctgtgacactctgaagacatgaaaagtaaacatcggaaagtgaaaatatttattttaaaaattgaaatgttggaacctttagcacagctttgcttggtgaaggacacgtgtcttctagttctgcctttt

SEQ ID NO: 1822 - DNA, 539 bp, Cricetulus griseus
aaggaaagcatcaggctcagaaaatgaaggtgattataaccctgggaggaaaccatctaaaacagccagcaagaaaccgaagaaaacatcttttgatcaggattcagatgtagacatctttccctcagacttcacttctgaaccacctgctctgccacggactggtcgggctaggaaagaagtaaaatattttgcagaatctgatgaagaagaagatgttgattttgcaatgtttaattaagtgcccaaagagcacgaacatttttcaaaaatatcttgtgttgtcctttgtcttttctgtctcagaattttgtacatctggcttattttaatgtgatgatgtaattgatggttttttattattgtggtaggccttttaacattttgttcttacacatacagttttatgctcttttttactcattgaaatgtcatgtgttgtctgattggcttgtagaattgttatagattaccgtgcattagcacagattttaattgtcatgattgcagactacagacctgctttttgaaatgaaatt

SEQ ID NO: 1823 - DNA, 332 bp, Cricetulus griseus
tttggccggcgttccgctaactggtatgaatcccctgtctccatatttaaatgtggatccacgatatcttgttcaagatactgatgagttcattttgccaactggagctaacaaaacccgaggccgatttgagttagctttttttaccattggaggatgttgcatgacaggggctgcatttggggcaatgaacggtcttcggctaagattgaaggaaacccagatcatggcctggtctaaaccaagaaatgtacagattttgaatatggtgactaggcaaggagcactttgggctaatactctaaggtccttggctttgctctatagcgcat

SEQ ID NO: 1824 - DNA, 561 bp, Cricetulus griseus
aatgtacacgtgacatttgtagcattctttaatccattttctgaaatgtatttgacattcaattacagtcagccttttgttttgtagaacattggtactattggcacagtctaaagccattaataattttatccatctgataattttacagtaagtaggcctcagttttgatagtcatcaaagaaacattgtccaccgtgacatttagattaagggcatttttaatagttgtatggctttttactgttagactaatggaaatcactaaagaaactgtagcatttcaaattatgcataagtatatagccattttgcagtttctttatgatgaaatacttaaactcattgttcttggtagatatgcttttgtttttctcataaaattataccagaaaatttcttctttttaagattttttagttagcagggatcaaaagcattttgtggaaacaaaccagctagtaacagtgcagcaacacttttaatttagctacaaattctccttttccaacttatgaaatccaaactgaattgtacattcaatacagagaaagggtggtc

SEQ ID NO: 1825 - DNA, 552 bp, Cricetulus griseus
tgaagaagcccagtgtgtccagttaaaacagaaataaactaaatcttcatcaacaaagacctgttttgtgactaccttgaattttctcagacttattggcctagtaatccttcagaaacagcatacttaagaacacctcttcccatgcgcctgtacccacaagatgtatttcaacactaaagcgtttgtattgtgattggattaagtatgtattcagttgttctcagtgaagggcaaatttaaatattatgtgcatttgtaaatatgatagctataaacttttcaatacttctaatggcagattagaggaggccataatactcctgagagactggacagttgattgtaaataggattttctaggctcggtaggtggaaagaattatttttctttgaaggaaataactttttatcatggtaattttgaaggatgattcctatgacatgttcactgggggaatgtggcttttaaaatcttgtatcggttgtaattgttcatatcttcttactcttctgtgttgacttcattattcccatggtatcggcctttta

SEQ ID NO: 1826 - DNA, 246 bp, Cricetulus griseus
  misc_feature (204)..(204): n is a, c, g, or t
caccatgatcatctaccgggacatcatcagccgtgacgagcggtgctccgacatctacaaaatccgggagatcgcggacgggctgtgcctggggggggggggcgagatggggagtagagcggagggggacatcgatgactcgctcatggggggaaatgcttccgccgaaggcgcatagggcgaaggagaccgaaagcacagtantcaccggtgtggatattgtgatgaaccaccacttacaagaaa

SEQ ID NO: 1827 - DNA, 527 bp, Cricetulus griseus
tttgtgaaacctactagttcaatgacgattaaaacaggaaagcatgtggatgcaaatgaggaaaatctaccttccttatctacatgactggaaacatccacggtcagagttgctggagcttattcagatcatgattgtgatatttggagaggagcctccagtattctcccgtcccactatttctgcatcctacccaccatacacagcaacagggccaccaaatacttgtcatgttagtggagcttttggaaatatcctgagaccccatgtctgcatatacaggttcctaccaaagactggcatttgggcttccatctgtgggtagaaatcaaagtgtggatgttctggatcccagagtggaagagaagatgccaaatagagctagaagttttaaattatgcatgccatggaaaagccttattaccacctggaaaccagatgtaatttgaaagatagcctgaggtctccctgtgactccaggaccagtgatgtagagaataattgcagtcagctagctcattcctttg

SEQ ID NO: 1828 - DNA, 378 bp, Cricetulus griseus
  misc_feature (41)..(41): n is a, c, g, or t
tcagacagtgcaggagaagaatgcgatgcagcggagggggnccgaaaactaaaggtgtccagggtgccgtcctccatcccctcaagaaaacctttttacatctccattccttattccacttggatttcctctatcaaggaagcccattcatgtgtatgggatcaactgtttatagtcttttcacactgcagctttgggaaactccatcccttgatttgtgttgtctcggccttcctggtgtgcagttactgctgtagaaaagtatcaatagcttcatttcatataaacacgagtaacttccagacacttgtgtagaggactgacagtgcatttggtatttaagtaatctgaaccagttcttcaagtggctgtgttttg

SEQ ID NO: 1829 - DNA, 484 bp, Cricetulus griseus
  misc_feature (149)..(168): n is a, c, g, or t
tcctcgatggtgctggctgccgctggaggggtggaacaccagcggctcctagaacttgcccagaagcacttcagcagcgtctctcgagagtatgaagaggatgctgtacctggtgtaactccatgtcgcttcactggcagtgagatccnnnnnnnnnnnnnnnnnnnncctttagcccacgtggccattgctgtagaaggacctggctggtgtaacccggacaatgtggccctccaagtggccaatgccatcattggccactatgactgcacttatggtggaggagtgaacatgtccagccctctggcttccgttgctgtgtctaacaagctttgccagagtttccaaaccttcaacaattcctactctgagactgggctgctaggtgcacactttgtatgtgatggcatgagcatcgatgacatggtcttcttcctgcaaggccagtggatgcgcctgtgcaccagtgccacagagagtgaag

SEQ ID NO: 1830 - DNA, 566 bp, Cricetulus griseus
agacagtacaccttcctcctcagagttccctctgacccagtccctctgttcccagggtgtggaggatgccttctacacactagtacgtgagattcggcagcataaactgcggaagctgaacccacccgatgagagtggccctggctgcatgagctgcaagtgtgtgctatcctgacagcaggtgaggcagggaccagccgacatctggcagtggccccagctagccagatgaacttcatatccactctgatgtccctgctccccccatcctgccaattcccctgctgcggtcagtggtgtcctttgtgcccgtctcggcacaggctcacgacgtggaggtgccggatgcagggaggaggtgcagacggaaggaaggaaagagaagggaaggaaggaaggaaacgatgctggagccagtccagtccagggatggtggacagaggtgaccaagaccttcgcatggacaatttgaacagactgtcatgaactgtccctattgccactggcaccccagtcctcaacccctctcagttcctttgggcgcctatggggcacaggttgaatca

SEQ ID NO: 1831 - DNA, 531 bp, Cricetulus griseus
  misc_feature (282)..(300): n is a, c, g, or t
cgctgttcgctcctgctgaggaacaagtcggtcaggaagccgcgcctcagccatggtgaggtggggggcgtcgccacgcggcctggggcgtcggcggggctcgacttgctggggcgccgggagcgcagagcccgggagagggctcccgccgcggcgagggcccgggagagggtcctcatggcggttgtgtaggagtgggcctccacttacgggtcgctgtttgtttttcccgcctgggtgataacaggcatttaaagataccggaaagacgcccgtggagcnnnnnnnnnnnnnnnnnnnaattcgaatcacgctcaccagccgcaacgtgaagtcgctggagaagggtcagtacgatgctcggggtggcttggtgatcgggaccactcctcctcgggctcccggactgccacgccggctggcctggttctccatagactgggaacaggtatgtctgatgcataggctgggctctggagggtttggctcggtgtataaagccacttaccacggtgttcctgtggccatcaa

SEQ ID NO: 1832 - DNA, 220 bp, Cricetulus griseus
tgaaccactttgatttgccaacatgtgatagctgcagagatgctgatgacaaacacaagctgataaccaaaacagaagccaagcaggaataccttctgaaagactgcgatttagagaagagagagcctgcgcttaggtttatcgtgaagaagaaccctcgtcactcacagtggggcgatatgaagctctacttaaagttacaggttgtgaagcgggctct

SEQ ID NO: 1833 - DNA, 545 bp, Cricetulus griseus
actgcgagaattgtgggcatcggactaatgaggtgaagtccggaggagcggtagagcccttgggtaccaagattaccctccacatcacagatccctcagacatgaccagagacctcctcaagtctgagacgtggggtgtggaaatcccagagctagagtttgaactgggaatggctgtccttgggggcaaattcaccactctggaagggcttctgaaagacatcagagaactgaacccattcacactgggcgatagctcaaatcctgaccagtcggagaaactgcaggagtttagccagaagttggatcagatcatcgagggcaagatgaaggcccactttactatggacgatccagcaggaaacagttacctgcagaatgtgtatgcccctgaagatgatccggagatgaaggtagagcggtaccagcgtacctttgaccaaaatgaggagctcgggctcaatgacatgaagacagagggctatgaggcatgcctggccccacagcggtagcagtgcacagctcacaggccagcttcagtgcca

SEQ ID NO: 1834 - DNA, 566 bp, Cricetulus griseus
ctccggagtggaggaccaacatgcagaagatgcagacgctggggagagcccgcccttaggtgccatcccaataacggactgcttattttgttcccatcactcaagctccctcatgaagaatgtggctcatatgactaaaatccacagcttctttattcctgatattgaatacctctcagatctgaaaggactgattaaatatttgggagagaaagttggtgttggcaagatttgcttgtggtgcaacgagaaagggaaatccttctactccacagaagctgtgcaggcacacatgactgacaaaagccactgtaagctcttcacagatggtgacgctgctttggaatttgcagacttctatgattttaggagtagctacccacattacaaggaggggcaggaccctaatgaaattgatcagttgtcctcggataagactttggaatgcgatgatgaaaccatggagctgatacttccttctggtgccagagtgggtcatcgctccttgatgagatactacaaacaacgatttggcttgccaagagctgtaacagttgctagaaacc

SEQ ID NO: 1835 - DNA, 129 bp, Cricetulus griseus
tacatttttcaggacggtatgctctggtagttgcaggagatattgctatatatgccacaggaaatgccagacctacaggtggagttggagcagtggctctgctgattgggccaaatgcgcctttaattt

SEQ ID NO: 1836 - DNA, 556 bp, Cricetulus griseus
gtgcaggctcggaccccgtggttatcgtctctgcggcgcggaccgccatargctccttywwtggtgccctgtctactgtgcctgkcsacgacctcgggacaactgtcatcaaagaagtcctgcakagggccaaggtggccccasaagadgtgtccgakgtcatattwggacacgttttgacggcaggttgtgggcagaatcctactcgacaggccagtgtgggtgcakggatcccctactcagttccagcatggakctgccakatgatctgyggctcawgcctcaaggccgtgtgtcttgcagcccagtccatagccataggtgactccakcattgtggtggcaggaggcatggagaacatgagcaaggcccctcactyggctcacctgakagcakgagtcaagatgggtgakatgccgctagctgacagcatactgtgtgatggtcttacagatgcgtttcacaactatcatatgggcatcacagctgagaatgtggccaaaaaatggcaagtgagtagagaagcccaggacaaggttgccgttgtgtcacaaat

SEQ ID NO: 1837 - DNA, 173 bp, Cricetulus griseus
agcatgcctcggtacccacaggctttacaagaattacctattgtttgcttctttggattgacatgcagatcggtttcaggattctcatactcaggacaaagaatgtacagagtttatgatgtgtgtcaagcatgcctcggtacccacaggctttacaagaattacctattgtt

SEQ ID NO: 1838 - DNA, 533 bp, Cricetulus griseus
aatggcaacccatcctggcacctggcggacagccccgcggtaaatggagccactggccacagcagcagtttggatgcacgggaggtgatccccatggcagccgtaaagcaagcgctgagagaggccggcgatgagtttgagctgcggtaccggcgggcgttcagtgatctaacatcccagcttcatataaccccagggactgcatatcaaagctttgaacaggtagtgaatgaactcttccgggatggggtaaactggggtcgcattgtggcctttttctccttcggtggagccctctgtgtggaaagcgtagacaaggagatgcaggtattggtgagtcggatcgcaagttggatggccacctacctgaatgaccacctagagccttggatccaggacaacggcggctgggacactttcgtggaactctacggaaacaatgcagcagctgagagccggaaaggccaggagcgcttcaaccgctggttcctgacgggcatgactgtggctggtgtggttctgctgggctctct

SEQ ID NO: 1839 - DNA, 500 bp, Cricetulus griseus
ttcggcagactcacgcaccaactgtgaggagccgggggtttgtgcctgggaaggccgcgtaccgggaggtgcccgactggtgggagctgtggccggcggagcccataagcccggcgcagtcccgaactcggtcgcctcttgcccctgtaggcactgtcatggcgcagttcgtgttcgagagcgacttgcactctctccttaaactggacgcgcccatccccaatgcacccgttgcgcgctggcagcgcaaagcgaaggaagccaccggcccagctccctcgcccatgcgggccgccaacagatctcacagcgccggccggaccccgggccgaactcctggcaaatctaattccaaggttcagagcacccctagcaaacctggaggtgaccgctatatcccccatcgcagtgcttctcaaatggaggtggccagcttcctcttgagcaaggagaaccagccagaagacggggagacgcccaccaagaaggagcatcagaaa

SEQ ID NO: 1840 - DNA, 236 bp, Cricetulus griseus
ggactacatgagagtcacagtgtgagatgaggttcagtgcatctctgctgaggaagggaaattcccaggctctaagcccaacccctcattccttcggctctccggaccaaaggacaccattttggcaggttataccaccaactaggcaaacatcttacaagatgcaatggccatactaattataccctctgcaaagcccaacttgaaaccttcacttgggaacataatcgtatcgc

SEQ ID NO: 1841 - DNA, 557 bp, Cricetulus griseus
  misc_feature (173)..(191): n is a, c, g, or t
ggaaacacaacctgggaagatggtggcggtgaagacctgctctctgctgctggtgttcctcttcctggcggtcgggctgggggaaaaagaagaggttcaattcagatcccatgctaaattcggtagcccccggcctcgaggcccgaggtatgcagaggggactttcattagtnnnnnnnnnnnnnnnnnnnacaagatccgccaacaagactttgtgaactggctgctggcccagaaggggaagaagaatgactggaaacacaacatcacccagagagaggcccgggccttgcagctggcaggacaatctcagagcaatgaggagacagaggggcagcagagctccttgcccaagaaccccagtgacgaaggtgtgctgagggacttcctgattcgggagctgctggcctggatggtggaccaaacagagctctccctgcccaggtttcagtgacggacctagctcagagcaggactggactctgccctttgcttgcccagctcctcgttccgccctggtccaaagtctccaagagaaccaaaccaataaagtcttg

SEQ ID NO: 1842 - DNA, 304 bp, Cricetulus griseus
tggtgggccgacgctttaccaagggcaagctgattatccctatcatgtatgtcaaggtgaacatgtaccaactgtttcagagcctgggctacattcactcccaaggagtgtgtcacagtgacatccagccccataatatgcttgtggaccccaagactgacgtcctcaagctttgcgatttgtagcagtgcaaaactagtcggttgggtgggagcccaatggttcctacatatagtactaggtactaccgtggcccgaacaggtcatatttccgagccgaaggattacacactcatccagtcta

SEQ ID NO: 1843 - DNA, 1369 bp, Cricetulus griseus
  misc_feature (423)..(437): n is a, c, g, or t
ggtcagactcctggacaaggtgttcagaccagaaaccagggaggaattcttcaagctgcagacaaagaccaaggtgacagtgctggagggtgacattctggatgcccagtgcctgaggagagcctgccagggcatctccgttgtcatccacactgctgccgccattgacgtctggggtatcattcccagacagaccatcatagatatcaatgtgaaaggtaccctgaacctgttggaggcctgtgtccaggctagtgtgccagccttcatctacaccagctcaattgatgttgcggggcccaactcctacaaggaaatcgtcctaaatggccatgaggaacaacagcatgaaagcacatggtctgatccatacccatacagcaaaatgatggctgagaaggcagtgctggcagccaatgggtnnnnnnnnnnnnnnngtggcactttgcatacttgtgccttaaggcctatgtacatctatggggaaaaaagctcaatactttcagggataatgattagggccatcaaaaataatggtattctgaaagttactggaaagttctccacagtcaacccagtgtatgtgagtaatgcagcctgggcacacattctggctgccaggggtctgcaagaccccaagaagtcaccaaacatccaagggcagttctactacatctcagatgacacccctcaccaaagctatgatgacttaaataacaccctgagcaagaaatggggcctccgccctgattccagttggagacctcctgtggccctgctgtactggcttggcttcctgctggaattggtgaacttcctgctgcgtccggtctacaactaccagcctcccttcacccgatacttggtcacaatctcaaatactgtgttcaccttctcctacaagaaagctcagcgagatctgggctatgagccccttgtcggctgggaggaagccagggagaacacttcagagtggatcgggtcactggtggagcagcacaagggaacactgaacacaaaggctcagtgatgtgactggcgatggcgggaacatgactgggtgctgtcaggaaatagttgtcaggttctccagaagagacagaggcccaacccaggtcttacttgcctccctttgacacagagatcaacgtagtgtcttcctcaagacaccagcagctggtccctgacccagccacagggtttcttccctccacacctgcccagtgacacacatgtggctgagcctcagcttctagttccaaaatattcagcacctcttgtaccttagagctctctccattggctacatctcccccacaaaaagcatttcttacctttggaaaattcccattactttatgaagtgcaat

SEQ ID NO: 1844 - DNA, 594 bp, Cricetulus griseus
ccccagctctggtgggcctgtgttctcctggagggaccaggccacgccgcagaaagacggggtcctggtgaccatcaacaagaaaaggaacctggtggtgtctgtggaagacggagccacctttgagattgtcctgcacaggacgtggaaggggagtgccgcccaccaggactttctgggcttctatgtgctggatagctcccggatgtcggcccggacgcgggggctgctggggcaattcttctgccccctggattttgaagtatctgacatccgcccaggctctgaccctatgaagttagatgccacgatgcgtgtgaagaatcggcagctggcagtcaccaggggcttacaaagagactacagcaaggaccccagacatggaacagaggtgtcttgctggttcatccacaacaatggagctggactgattgatggagttcacactgactacattgtcccggacatcttctgagccctccagctagtccgcacctgagactgcatctgaggagggagaggagggcatcgaattaaccccaccctcctgagcgtcctggccctttgtgatttcattaaagagaggctgtgtcc

SEQ ID NO: 1845 - DNA, 108 bp, Cricetulus griseus
tttcaaaagaaattccagtggagtctattagaagaggtttctaagatcatcaagatagcaccggtgatctggggaacaattatttcatggcctaaatgaattattgga

SEQ ID NO: 1846 - DNA, 449 bp, Cricetulus griseus
attccagaggaactctatgaaatgctcagtgaccactccatccgctcctttgatgaccttcagcgtctgctgcatggagactccgtagatgaaaatggggctgagctggacctgaacatgacccaagcacactctggaggcaagccagaaagctcatctcgagggaggagaagcctaggttccctggcagccgcagagcccgctgtaatcgctgagtgcaagactcgcacagaggtgttccagatctcgcggaacctcatcgatcgcaccaatgccaacttcctggtgtggccgccatgcgtggaggtgcagcgctgctcgggctgctgcaacaaccgcaacgtgcagtgccgggcctcgcaggtgcagatgcggccggtgcaggtaaggaagattgagattgtgcggaagaagcccgtcttcaagaaggccaccgtgaccctggagga

SEQ ID NO: 1847 - DNA, 543 bp, Cricetulus griseus
cacgtgtgaaggttgcaagggattcttcaagaggagccagcagaacaatgcctcttactcctgcccaaggcagagaaactgtttaattgacagaaccaacaggaaccgttgccaacactgccgactgcagaagtgtcttgccctaggaatgtcaagagatgctgtaaagttcgggaggatgtccaagaagcagcgggacagcctgtacgctgaggtgcagaagcaccagcagcggctgcaggagcagcggcagcagcatattggggaggcagaggcccttgccagggtgtacagcagcagcatcagcaacggcctcagcaacctgaacactgagagcggcggcacctacgccaacgggcacgtgattgacttgccgaaatccgagggatattacaacatagattctggtcagccatcgcccgatcagtcaggactggacatgactggaatcaaacagataaagcaagaacctatctatgacctcacatccgtacccaacttgtttacctatagctctttcaacaacgggcagttagctccggg

SEQ ID NO: 1848 - DNA, 84 bp, Cricetulus griseus
aatggatgcagtcccagacaaagtccacttcttcaacagcttttttcatagacagctggtaaccaaaggctataatggagttaa

SEQ ID NO: 1849 - DNA, 484 bp, Cricetulus griseus
tggccattggaatggacggttccatcccgagacaacaacaaatgttatgcaaaaataatctgtaatcttgaagacgatgaacgtgtcgtgggctttcatgtactgggtccaaacgctggagaagtgacacagggcttcgcagctgcactcaagtgtggactgaccaaacagcagctggacagcactattggtatccaccctgtctgtgcagagatattcacaacgttgtcggtgacgaagcgttctgggggagacatcctgcagtctggctgctgaagttaagccctggtgtggatgctgccgccaagactacaggccactgccttgcttccttgcccacatctaggtgaagttcaagctcttgggctcttggcgcctgtccaaagtgctgtcctaaagccaccagatggcaggtagtaggctgcagcatcacactgaggtcaccttgacagactcagacagacattcggcagtgtgtcaggga

SEQ ID NO: 1850 - DNA, 1343 bp, Cricetulus griseus
  misc_feature (1183)..(1204): n is a, c, g, or t
tcacacacctgcagtggccagggtgggggtcaggagtgtaaggccatgctggctgcccttggctggtcacgcttggaactcttggtttattctgcatacaatgtgcagccaggagagctagagaagcagaccatctcagtgagctctagctcctctgcaggagggcagcatgcctttattttatggttagaaaggctaaatttctatcaacctagctaaaacattccttttccttgtttcttttttcctcccgttaccatggtgcaaaccagcccgagcgatcgacccgttgtacagccttagcattcccctctcgagcctgcgctggaaggatgttctgcaaacaggagcgtggactatctgaaccatcctcatagtgagtctttatgactgtaagattgtaaatacagattatttattaaccctgttctacctggaattagattgcatatggcaaatgtttgccagcaggtagctgaggcggatcagcaaattgctccagaaccagtgtgtggaatgaccaacagaagtcatcacttttcatttggggcttagagtgatgatttggactcctttggctttcccctttcttttctcgttcgtgtaggaattaggtggcggtcccattgcattcagagagtagagtaaaggaagccagaagtcgatcgtacacactctggcattgacagagaaactataagcctctttattacgagaaagcgatacaaacatgtttctttagttcattattttcccaaaagagtcaaaggtggaacttatatacaaatattacctcatttgttgtgtgactgtgtaaagaattttgcaacaagtagaaagagtttaagtgtcaaaaaacttaaaactactgctgtgtctaaaaagtcagctgttgtacctagcataaaaatcctttgcagaagatgatcccaataaagaatagctttgaaagttaaatacaacttctcaaagttactgctttcgttctatcatctttggtaccgttgcttttatttttataattattttctcattgccattggaatagagatctcagacatgtagatatgctatttaaataatttatcaggaaatactgtcatgtagagtattctatttttatacgtttgcacactgaattgaagaaatgttggttttccttgttttagtttagtttgtttcnnnnnnnnnnnnnnnnnnnnnnctttttactccccagttttactattttgccaatacccttttttttcctaggaatgtgcttttttttgtacacatttttattcattttacattctaaaacagtgtaacttgtatattactgtttcttatgtacaaggaac

SEQ ID NO: 1851 - DNA, 575 bp, Cricetulus griseus
attcagagcagatatcaaggcaatgggtctgagtctacagtggctgtattctgctcgtggagactttttccgtgctacatctagactgacgactgatttccataatgctgagaaaacaaacagatttgtcgtgagggaaatcaataaccgtattatgaaagtggaatatcacttcctgtcaccctacgtatctccaagagagtctcctttccgacacatcttctggggttccggctctcacactctcacggctttagtggagaacttgaagcttcgtcagaaaaacagtagtgcttttaacgaaacactcttcagaaaccagttggccctagctacttggactattcagggagttgcaaatgccctctctggtgacatttgggatattgacaatgagttttaaatgtaacataattaaataagagcagggcagtctgtttctagacttgtactggttgtgctaaattttcattagagctcaaatctaatgttataattctacccgatcatcctgatactaaatgtctttaggcagcagcttttagtgcagggttggacctacacttgaagttaca

SEQ ID NO: 1852 - DNA, 414 bp, Cricetulus griseus
aggacatccttctgtccagtgcaccctctggacctcaatttcccttcaaaggggtggatgatcgtgagtcctggccctctgtgttttataatagaacctgtcagtgctctggcaacttcatgggattcaactgcggaaactgtaagtttggatttgggggatcaaattgcacagagaagcgactcttaattagaagaaacatctttgatttgactgtcccagaaaagaataagttctttgcttacctaaatttagcaaaacatactatcagcccagtctatgtcatccccacaggcacatatggccaaatgaacaatggatcaatacccatgtttagtaatataagcgtctatgacctctttgtatggatgcattactatgtgtcaagagacaccctgcttggaggttctgaaa

SEQ ID NO: 1853 - DNA, 549 bp, Cricetulus griseus
cgccgagggagttcacagctctgtttttacgaagcttcactaccagagcactatgaatgttaatgacctcaaactcaggttgtccaaagctgggcaagagcacctgctgcggttttggaatgagttggaagaagcccaacagacagaactttatatggagctccaggccatgaactttgaagagttgaacttatttttccagaaggccattggaggatttgatcattcctctcaccaagaaaaggtggatacccgaatggagcctgtgccccgagaggtgttgggcagtgctaccagagatcaagaccagctgcaggcctgggagaatgaaggactttcccagatttctcggaacaaagtagcagttctccttctggctggagggcaggggacaagacttggagttgcttatcccaagggcatgtatgatgttggcttgccatcccacaagacactttttcagattcaagcagaacgtattctgaagctacagcggttagcggaaaagcagtatggcaacaagtgtgtcattccatggtatataatgac

SEQ ID NO: 1854 - DNA, 579 bp, Cricetulus griseus
  misc_feature (270)..(283): n is a, c, g, or t
  misc_feature (286)..(298): n is a, c, g, or t
aaggagctgaccactccagcatcgccatcaggattctggcaggctgtaccacaggagccatggcagtgacctgtgcccagcccacagatgtggtgaaggtccgatttcaagccatgatacgtctgggaactggaggagagaggaaatacaaagggactatggatgcctacagaaccatcgccagggaggaaggaatcaggggcttatggaaagggacttggcccaacatcacgagaaacgccattgtcaactgtgctgagatggtgaccnnnnnnnnnnnnnnggnnnnnnnnnnnnnactctcacctgttcactgacaatttcccctgtcactttgtctctgcctttggagccggcttttgtgccacagtggtggcctccccagtggatgtggtaaagaccaggtacatgaacgctcccccaggcagatacctcagccctctccactgtatgctgaagatggtggcacaggagggccccacggccttctacaaaggatttgtgccttccttcctgcgtttgggagcctggaatgtgatgatgtttgtaacttatgaacagctgaaacgggccctggaa

SEQ ID NO: 1855 - DNA, 176 bp, Cricetulus griseus
accgacctgggcaacaaggagcgaggcaagatatggcaccgcaagccgtcgccggccactcaggacgggattatagtgaacgttgttcacaccacttctgaataccaccggaaagtcttgcggtttttgaatgtggcttttgacggctcaggcgattcctttcttgccggggacca

SEQ ID NO: 1856 - DNA, 205 bp, Cricetulus griseus
gatcctggctgtgaagccagccaaagagatgagttcattattgaaaagttaaagtcggctgtgagcgaaatagcactgagcaggagcaagttacaggacgagaaccagaagcttctgcaagagctgaagacgtgtcagaggcagtgccaggccatggaagcaggactgtcagaggtgaagaatgagttacagtcacgcgatgatc

SEQ ID NO: 1857 - DNA, 393 bp, Cricetulus griseus
ccggcccgagaatgagcaccaggtgggccagcccgagaacgagcaccgggtgggctggcacgagggcgagcaccaggtgggtcagcacgagaacaaacaccgagtgagccggcctggagctctgcccctgagcccccgccccgcccgaagagaaacactccgtcccaaggtctccgcccccaaggtcaggccatcaggaagggggggggggaattgagtctgctgtaccagacaccagaccttgagaatatgctgatctggaatggctctgtgtctcatttgaaccatccaatagaaataattctgtatttcgcctcatttgaaagactctgtgtttcacctcatttgaataactctgtacttgcctcattgaataaccctgtatagcgcctc

SEQ ID NO: 1858 - DNA, 94 bp, Cricetulus griseus
ccgggcctgcatcctggagatggtatgcaggaagcccatgacagatgaatctgacatatctggctctcagaagacacaagtttctactgtctct

SEQ ID NO: 1859 - DNA, 550 bp, Cricetulus griseus
tccgtcgctctctttggctctgatcccggtttgtttacgtttaattttggcatttccagaaagcaaatcctcgaggtgtaaaatgcctacctgccctctctcggatgttcaggtggacaagcagacagggatttggttgcggtacaagtacctttcacttgtggcccaagcctggcctctctcctctcccttcaccccccccaggagagacttagacgcttacccccacccctgcactgtccaatgcaagtcactcaaaagagctgtcaaagggtttttacccagtgtcacaaaggtcacctgttcaccatggccataggtcacacagaacatgtcccttcagctttattgagcctggtccatctcacctagcacagggcaggcgcttgcccgcacagacgctgagggcgcaggacccagctgagctaaggttagaccactgtacatagatctgccccgtggaattactctcctttggcactcagtaatagaacatgacatgcagtggggcggagctcctggcaatgtacatagatgcatcattcctgta

SEQ ID NO: 1860 - DNA, 411 bp, Cricetulus griseus
atggcacggtcagtgctggtaccgccaggacctgacagcttccgcttctttaccagggaatcccttgctgctattgaacaacgcattgcagaagagaaagccaagagacccaaacaggaacgcaaggacgaagacgatgaaaatggcccaaagccaaatagtgacttggaagcaggaaaatcccttccttttatttatggagacattcctccagagatggtgtcagagcccctggaggacctggacccctactatatcaataagaaaacctttatagtattgaataaagggaaagcaatctctcgattcagcgtcacctctgccctgtacatcctaactcccttcaaccccattagaaaattagctattaagattttggtacattctttattcaatgtgcttatcatgtgc

SEQ ID NO: 1861 - DNA, 1299 bp, Cricetulus griseus
  misc_feature (361)..(430): n is a, c, g, or t
cctggatggatcagtcaggttcggcgtcggagctctctgcttggttctcagctggaagcggcactctacagtgagcaggagctgtcctatatccagcagggagaggtggctatgcagaaggccttgagtatcctcagcaaccaggaaggctggaagaaagagaaccagcaggaaaacggggatgaggtgctgagtaaagtggtccctgatgtgggcaaggtatttcggctggaggtggtggtagaccagcccatggacagactctatgcagaacttgtggaccgcatggaggcaatgggagagtggaacccaaatgtcaaggagatcaaggtcctgcaaaagattgggaaagacacagtcnnnnnnnnnnnnnnnnnnnnnnnnnnnnnnnnnnnnnnnnnnnnnnnnnnnnnnnnnnnnnnnnnnnnnngtgccaagcgccgaggctccacctgtgtgctggcaggcatagccacacattttggggagatgcctgaacaaagcggtgttatcagagctgaacagggtcccacctgcatggtgcttcacccactggctgggagtccctcgaagactaaattcacttggctgctcagtattgacctcaaggggtggctgccgaaaagcatcatcaatcaggtcttatcacaaacccagatggagtttgccaaccacctgcgcaagcgcctggagtccagctctgcctctgaggcccggtgttaagactgtacccactacatcaacctgcatgccatcagcagcctcccgcaggaagcctgcaagtctgtttcaaatctccagttgatgactacgggaggggtagtacttatcagacactaggactgactggcgaaacatgaccatcaggaaattagcaatgaggctgagcagaagagagcctcagcctctcccacaagattagctgtgaagtgggctaagagatagacatgctaacacttttatgtaggcctgtgtatgctcacctaaaaaccctactcaaaacgcaagtagttagtgtgacaagggggggtgtttaggaactgttgtcttctgagctcaaagccactgcctgaagcagtgtgtgcacacagcaaggcttccccagggacttcagtgaccctctgttcctccataaaaggccaagaacatcaaaccactcacaaacagacccttccagagtacactccaagttctctctaaggagaaaggaaactaaatattacgttggcttccctacttattacatcacaataaagtaccacacatgaaatttcagcctatacttgtcaagtcctatgg

SEQ ID NO: 1862 - DNA, 144 bp, Cricetulus griseus
ttgctgttttaggatctgctcttgacaaagtgacagcaagtttatgtgatcttaaatcaaggcttgactcaagaacatgtgtggcgccagatgtctttgctgaaaacatgaagctcagggaggacacacatcacttaggtaaaa

SEQ ID NO: 1863 - DNA, 285 bp, Cricetulus griseus
  misc_feature (59)..(59): n is a, c, g, or t
  misc_feature (206)..(206): n is a, c, g, or t
atcaggacaagtaccgctaccggtaccccaaaggcgagtcctatgaagacttggtgcancgactagagcctgtcattatggaactggagagacaggagaatgtgctggtcatttgccaccaggctgtgatgcgctgcctgctggcctacttccttgacaaggcagctgaagagctgccctacctcaaatgtcccttgcacacagtnctgaagctcacacctgtagcttacggttgtaaagtggagtccatattcctgaatgtggcagctgtgaacacacaccgag

SEQ ID NO: 1864 - DNA, 492 bp, Cricetulus griseus
aggaaggtactctttgagcacatccaactcatccattgccgctcttctctgtgccctttacccacatttcccagcccacagcactgacaaccgctatcatctccaggctctccggcacctctatgtgctagctgcagaaccaaggctcctggtacctgtggatgtggatacaaacacaccatgctatgcccttatagaagttacttacaagggcactcagtggtatgatcagaccaaagaagaactgatggctccaacccttcttccagaacttcatctgttaaagcagatgaaagttaaagggccaagatactgggaactgctcatagatttaagcaagggagaacagcacttgaaatccattctttctaaagatggggttttatatgtaaagctcatggcaggccagctgtcctacaaagaagatccaatggggtggcagagtttgttggcgcagactgtgtctaacaggaactcggatgtcaggtcttt

SEQ ID NO: 1865 - DNA, 400 bp, Cricetulus griseus
agcatgtgcattacagagatcagaaagaaatgaattctcttcttactgattatgccattgactcaaaatccaaggatgtcaagacaaacgtgggtctcaccgaaataaaaaatgccttaaagaaacagatatacagagacgtatatagagctcaggctgtacgatacaactgcattagaatagataaacagcctgtatacaatgtagaggttaagaatgcagagctccccagaggaatattaaacttaattgaaagcctcatagagggacaattctttaaagaagccattgaagagctttgctctttgcaagcccattatgtccctcctgtgtgccttctccacacccttctagagaatgtcctacaggataacatagatacattttctggtcgatactt

SEQ ID NO: 1866 - DNA, 514 bp, Cricetulus griseus
ttcaggccatgcatgcccagtcagccgagctacagagactggccatggagcagcagtggctgcatggacacccacacatgcacggtggccacctgccaagtcaggaagactattacagtcgactgaagaaagaaggtgacaagcagttataagttatttatttgttaatgctggctgtggaaaccccagttctagggggcagaaacgggactttacatccagtaggagctgcaagagcaaagaggaatatcgtctaaagatttctctatatatttaaaacccacaactaaaaacacatctgcataatagtgttcgtttgttgagaggatttcccgagacctatttgggtctccctgcatgacagtcccccagaaacgtggtgtgtcttgggttggactgacccctataaagcttacctgcagtcttggggtttggctttggttcttttccttgatttcccagtaggtgctagagtccgcccacactcttcactgtgcgcgcagacgctgaggca

SEQ ID NO: 1867 - DNA, 404 bp, Cricetulus griseus
  misc_feature (262)..(262): n is a, c, g, or t
  misc_feature (327)..(327): n is a, c, g, or t
cacaccctcgcttgttgtggaccataggcgcttaaaaaatcttttggagactgttgttaaaaaaagtcaggaatataatatattccaactggaaaacttgtatgcagttatcagccagtgcatttatgagcatcgcagggactatgacaaaacagctcttgttcagaaaatggagcaagcagtagaaaacttcaattgttccagatcatgatgtcattgcaccaagtatttttatattcaattcctatttgattgtcttcanatatgtccacataactgatgcaagataaaatgaaatcttgcattttgaagaaaaattaaaatagngaaagtattttaattccctggtacttatgtacatgtggtaagataactgataagtcttggatgtttgagcagaacac

SEQ ID NO: 1868 - DNA, 233 bp, Cricetulus griseus
  misc_feature (158)..(158): n is a, c, g, or t
tatgtggagactgttacttctcgccagagtgaaatccataagttcattgcagatggctgcaaagaagccctgcttgaggaaaaaagcgcttctgctttctggtggacaagcactgtagctttgccaatcacatacactactatcaccttcagtctgcnaaattacttaattccaacctgtcccggaggcaggaaacctgtcgagatgccacataagcaccagagaaaatcatg

SEQ ID NO: 1869 - DNA, 567 bp, Cricetulus griseus
ggagaattcatgactcacaaacttaaacaaactgagaatgctttcagccccagccgcccaggatgccgggccggtggggacaaggaagctgaaggtgcccctcaagtggaagctggcaagaggctggaggaactgcgccggcgccgcggggagactgagagcgaagagttcgaaaaactcaaacaaaagcaacaggaggcagccttggagctggaagagctgaagaaaaagagggaagagagaaggaaggtcctggaggaagaggagcagaggaggaagcaggaggaggccgatcgaaaagctagagaagaggaagagaagaaaaggctaaaggaagagattgaaaagagaagggcagaagctgctgagaagcgtcagaagatgccagaagacggcttgtctgaggacaagaagccgttcaagtgtttcactcctaaaggctcatctctcaagatagaggaacgagccgaatttctgaataagtctgtgcagaaaagtggcgtcaaatctactcatcaagcagcggtagtctccaagattgacagcaggctggagcagtataccaat

SEQ ID NO: 1870 - DNA, 519 bp, Cricetulus griseus
cgaggcctgaaggatgctaaccaaattcgagaccaagagcgcgcgggtcaaaggccttagttttcatcccaaaagaccctggatgctggcgagtttacacaatggggtcatccagttatgggactatcgcatgtgcactctcattgacaagtttgatgaacatgatggtccagtgcgaggcattgacttccataagcagcagccactgtttgtctctggaggagatgactataagattaaggtttggaattataaacttcggcgctgcctcttcacgttgcttgggcacttagattatattcgtaccacattttttcatcatgaatacccttggattctgagtgcctcagatgaccagaccattcgagtgtggaactggcagtctagaacctgtgtctgtgtgttaacaggacacaaccattatgtaatgtgtgctcagttccacccctctgaagacctggtggtatcagctagcctggaccagactgtccgagtttgggatatttctggtgagctgcc

SEQ ID NO: 1871 - DNA, 561 bp, Cricetulus griseus
gtatcaggcctgtggcccccatgctcatcccccacagggcaaacagtgacatgagcattggtgagtttagcatccccaagttcacacccgtgatcatcaatttgtgggcactgcatcatagtgagaaggaatgggaccagccagatcggttcatgcctgagcgcttcctagacccaacgggaagccatcttatcacaccctcattaagctacctgccctttggagctggagcccgctcctgcatcggagaggttctggcccgccaggagctcttcctctttatggctcacctgctgcagaggtttgacctcgatgtcccagatgatgagcagccgccctgcctgaagggtaacgccaacgtggtctttttgatagaccccttcaaagtgaagatcacagtgcgccaggcatggaaggatgcccaggcagaggttaacacctggaggccataactaatgtcccctggtcctatattgtgcagctcacagcacaaaattagaggtgctactcctactgcctcctatagtcctcttccttcctgtcctgttttctggtttgcag

SEQ ID NO: 1872 - DNA, 493 bp, Cricetulus griseus
taggcagtaagatccgggcaagaaaaggataagagcaaggaactgcacgctattaaggaacgttatctgggtggcaccaaaacacggcgccgaacaaggcatctcaatgcccgaaagtttgtctttgagtgggaagcatctgaagatacctccattgactacaaccctctgtacaaagagcggcaccaggtgcatttgttggggcgaggcttcattgcaggcattgacctaaagcagcagaaacgagaacagtcacgtttctatggagacctaatggaaaacaagcgcaccctggaagaaaaggagcaagaggaggcaagactccgtaaactccgtaagaaggaagccaagcaacgctgggatgaccgccattggtcccagaagacgttagatgagatgacagacagggactggaggatcttccgggaagactatagcatcaccaccaaaggtggcaagatccccaatcccatccgggcctggaaagattcat

SEQ ID NO: 1873 - DNA, 492 bp, Cricetulus griseus
  misc_feature (213)..(245): n is a, c, g, or t
gatgacattccagtcgaagcaacaggcaacaactgkcctccacatattgaaagtttcagtgatgttgaaatgggagaaattattatgggaaacattgagcttactcgttatactcsccaacttcagtacaaaagcatgctattcctatgtatcaaagataaaatagacttgatggcttgtgcccaaacaggctctggaaaaactgcagaattnnnnnnnnnnnnnnnnnnnnnnnnnnnnnnnnntggtccgggagaggctctgagggccatgaaggaaaatggaagatatgggcgtcgcaaacaatacccaatctccttggtactggcaccaacgagagaattggcagtgcagatttatgaggaagcaagaaaattctcataccgatctagagttcgtccttgtgtggtttatggcggtgctgaaattggtcaacagattcgagacttataacgtggrtgccacttgttagttgctactccgggacgccta

SEQ ID NO: 1874 - DNA, 476 bp, Cricetulus griseus
  misc_feature (269)..(288): n is a, c, g, or t
ctacagtcagatgttttaatgaccattattaaagatcttctcaattttcgatctgacctgaaagtaatattaatgagtgcaacattgaatgctgagaaattttcagaatattttggtgactgtcctatgatacatatacctggttttacttttccagttgtggaatatcttttggaagatatcattgaaaaaataagatatattccagaacaaaaagaacatagatcccagttcaagaggggtttcatgcagggccatgtaaatagacnnnnnnnnnnnnnnnnnnnnggctatctataaagagcgctggccagtttatataaaggaacttcgaacaagatactctgcaagtaccgtagatgttttggaaaggatggatgatgataaagttgatctgaatttgattgctgcccttattcgatacattgttttggaagaagaggatggtgcaatactggtctttctaccaggctggg

SEQ ID NO: 1875 - DNA, 497 bp, Cricetulus griseus
  misc_feature (225)..(250): n is a, c, g, or t
cacttcctaacatagagagtgggaatgaagatgatgactccttcaaaattaagacagtggcccagaagaaggcagaaaagagggaacgcgagaaaaaaaagagagatgaagaaaaagcaaaattgcggaaactgaaagaaaaagaagagctagaaaaaggtaaaaaggaccagagtaaacagaaagaacctcagaagaaatctgaagaggaaggtttgaaactcnnnnnnnnnnnnnnnnnnnnnnnnnnctctgaagagaaaggagacattcctacagctgtagaagtagatgacaatgaaggagacaaaaagaaaaaagataggaagaaaaagaaaacagaaaaagatgaaaaagagaaagagaaaaagaaaggccctagcaaatctactgttaaagctatccaagaagctttggctaagcttaaagaggaggaggagagacaaaagatggaagaggaagaacggattaaacgtcttgaagagctagaagccaaa

SEQ ID NO: 1876 - DNA, 524 bp, Cricetulus griseus
cttcaaaatcaagtgaatggtacagaatggtcatgagaaaaatttgaatacattgtgttgggcaataggctccattagtggtgcaatgcatgaagaagatgagaagcggtttcttgttactgttattaaggatcttttaggattatgtgagcagaaaagaggcaaagataataaagctataattgcatcgaatatcatgtacatagtaggtcaatacccaaggtttttgagagcacactggaaatttttgaagacagtagtaaacaagctgtttgaattcatgcatgagacccatgatggagtccaggacatggcttgtgacacattcattaaaatagcccaaaaatgccgcagacactttgtgcaggttcaagttggagaagtgatgccatttattgatgagattttaaacaacataaatactataatttgtgatcttcaacctcagcaggttcatacattttacgaagctgtgggatatatgataggtgcacagactgaccagacagttcaagagcatttga

SEQ ID NO: 1877 - DNA, 445 bp, Cricetulus griseus
agagtatggctccaatccagaggagagaccacctaacctgaagaggcccgaggattatgaagctgtgttcgtgggcaacattggtggggacttcaagattggggtggcaatacttcagaggagcattcgtctctacgcccccttttactcctccgacatcctcatcgcctcccccctgggcttgagaaccatcattggtggagaaggagagaagaagagagattttgacttcctgtcttctattgagcttctcatcatcgaccaggctgacatttacctgatgcagaactgggaacatgtcttgcatttggtgaaccacatgaacctgctgactttggagtcccatggggtggacttttctcgagttcgcatggagagccttattaactggtgcaggttctaccgccagaccctgctcttttgcgccctgcaggatgcccagatc

SEQ ID NO: 1878 - DNA, 559 bp, Cricetulus griseus
cgagctctggacaccgtggaagatgacatgagcatcagtgtggagaagaagatcccgatgctgcgcaactttcacactttcctctatgaacccgagtggcggttcacggagagcacacagaaggaccggcaagtgctggaggacttccccacgatctccttggagtttagaaatctggctgagaaatatcaaacagtgattgctgacatctgccagaaaatgggatgtgggatggcagaatttgtggacaagcatgtgacctccaaacaggactgggacaagtattgtcactacgttgctggactggtaggaattggcctttctcgtctgttctcgacctcagagtttgaagatcccttagttggtgaagacacagagtgtgccaattcaatgggtctattcctgcagaaaacaaatatcattcgtgattatctggaggaccaacaagaaggaagagcattttggcctcaagaggtgtggggcagatatgttaagaagctggaagactttgctaagccagaaaacatatatgtggccgtgcagggcttgaatgaactca

SEQ ID NO: 1879 - DNA, 533 bp, Cricetulus griseus
aggcaagtacaatcggggtttgactgtgttgcaagcataccgggagctggtggagccsadgaaacaggatgctgakagtcttcadcgggccctgacagygggcykgtgtgtagaactgctccaggctttctttcttgtgtcagatgacatcatgrattcctccctcactcgacgtggacagatctgctggtatcaraagccargcatargcttggatgccatcaatgatgctatgcttctggaagcctgcatctaccgcctactgaagttctactgcagggagcagccctactacctgaacctcctggagctctttctgcagagttcctatcagacggagattgggcagactctcgacctcatcacagcaccccakggccatgtggatcttgatagatacactgaaaagaggtacaaatctattgtcaagtacaagacagctttctattctttctacctgcctgttgcagctgccatgtacatggccggtattgatggggagaaggaacatgccaatgccaagaagatcctgc

SEQ ID NO: 1880 - DNA, 541 bp, Cricetulus griseus
gacacttgatcttcggtgggcagtaggaattaaagaccctcaaattcgggacttgctgactccacccacagataaaccaggtcaggacaatcgaagcaagctccggaacatgacggacttccggctggcaggccttgacatcacagatgccactctccgactcatcattcgccacatgccccttttgtctcgacttgacctcagtcactgcagccaccttacagatcagtcctccaacctactcactgctgtcgggtcttccactcgatactccctcacagagctcaatatggcaggttgcaataaattgacagaccagaccctgttcttcctaaggcgaattgctaatgtcaccttgattgaccttcgaggatgcaaacagatcactagaaaagcctgtgagcacttcatctcagacttgtgcatcaacagcctctactgcctgtctgatgagaaactgatacagaagattagctaagacatgctcagactggactgaacaggaaaatcttcccctgccttcccaccaaggagagtctct

SEQ ID NO: 1881 - DNA, 358 bp, Cricetulus griseus
agccaaaggctgaaggctatgctgagggtgacctcactctttatcaccgaacctcagtcactgacttcttgcgagctgccaatcctgttgactttttttccaaggccgcgaaatttcaatagatgatgaagagttagcacagcatccagctacaactgaggatataagagcatgctgtcaggacatcaaagttctggggcgcaaagaactaaggtctctactgaattggagaacaaaacttcggcggtatgtggccaaaaagctgaaagagcaagcaaaggcactggacatcatcctcagctcataagaagaacgtgatgaggatgagtcaatagctgagacatagcatgatgattca

SEQ ID NO: 1882 - DNA, 544 bp, Cricetulus griseus
gatgtcaattgcactccttagatacacacaaacctaaacctttgggaggatgttggatggatgtatgggaactaatgtcccaggaatgcagggatgaagtagttttaattgactccaggtgtcttttagaaacactagaaacatatctgcgaaagcacaggttttgcactgattgcaaaaataaagttctccgagcgtacaatatcctcattggtgaacttgactgcagcaaagagaagggctactgcgctgcactttatgaggggctgcggtgctgtccacacgatcgacacatacatgtttgctgtgaaacagacttcattgcgcatctcctgggccgtgctgagccatagttcgcaagagggcgaagagaacggcatgctaagacaatagatatagctcaagaagaagttctgacctgcttggggattcatctttatgaacgattgcatcggatctggcaaaaactgcgggccgaagagcaaacgtggcagatgctcttctatcttggtgttgatgctttacgtaaaagctttgagatgac

SEQ ID NO: 1883 - DNA, 443 bp, Cricetulus griseus
gtcctgagaacatgggacttcttgatcctgcgaccagtgatgggagagttattttcttcttgccttgggagaagatgactattgctggcactactgattcgccaacagacatcacatctcatcctattccttcggaagaagacatcaacttcatcttgaatgaagtgcggaactacctgagttgtgatgttgaagtgagaagaggggatgtcctggcagcatggagtggtattcgtccccttgttaccgatcccaagtctgcagacactcagtctatctcccgaaatcatgttgttgatgtcagtgagagtggcctcatcacaatagcaggtgggaagtggacgacatatcgctccatggcagaagatgctgtggatgcagctgtcaaggtccacaacttgaaagcaggaccgagtaggacagtggggctgttccttcaagga

SEQ ID NO: 1884 - DNA, 541 bp, Cricetulus griseus
  misc_feature (423)..(441): n is a, c, g, or t
tcctgttgctgactgtgaaccacccccagtggataggaacctcaagccagacagaaaagccaagccggcacctctggaaataaagccgctgccggagtgggaagagctacaagccccggtcagatctcccatcaccaggagcttcgctcgggactcctctagattccccttgtcccctcgacctaactctgtgcacagcacgacatcgagcagcgactcccatgacagcgaagaaaactacgtccccatgaacccaaatctgtccagcgaagatccgaatctctttggcagtaacagccttgatggagggagcagctctatgatcaagcccaaaggagataaacaagtcgaatacttagatctagacctagattctgggaaatccacgccacctcggaagcaaaagaacagtggttcgggcannnnnnnnnnnnnnnnnnnggtggactacgtggtggtggaccagcagaaaactctggccctgaagagcactcgggaagcctggacggacgggaggcagtccacagagtcggaaactccc

SEQ ID NO: 1885 - DNA, 520 bp, Cricetulus griseus
  misc_feature (27)..(62): n is a, c, g, or t
gattataagtacttgcgctggcaggtnnnnnnnnnnnnnnnnnnnnnnnnnnnnnnnnnnnnggatcggaacaccattgaaatgcaagctatcacagccctggcccacctccgagctgcagttctgtatgtgatggatttgtctgagcagtgtggacatgggttgaaggagcaattagaactcttccagaatatcagacctctgtttatcaacaagcctcttattgttgtagcaaacaaatgtgatgtgaagagaataactgagctttctgaagaagatcagaaaatatttaccgacttgcaggctgaaggattccctgtcatcgagaccagcaccctgactgaggaaggtgtcattcaggttaaaacagaggcttgtgataggcttttggctcatcgagtcgaaacaaaaatgaaaggaaataaagtgaatgaggttctgaacagattgcatttagctgtgccaaacaagagagatgataaggagcgaccccctttcatcccagaaggagtggtagctc

SEQ ID NO: 1886 - DNA, 319 bp, Cricetulus griseus
ttcctccgcagtctggagccaggcggagcccagacctggcggggacagctgcatccccggcccgggacccaaagcctgccgccaccaccaccaccgtccatcgttggtaccggcaatggccttcgtatcgcccgatgtgcttgtgactgatttgaacccaaaatattgagaactcacgtctgtccccatcttaaccgtgcccgcccttaaggcttaactgcagcgccgctagactgtctgactttgagagcaccatggaccaaagtgggatggagattcctgtgactctcatcattaaagctccgaatcagaaatacag

SEQ ID NO: 1887 - DNA, 334 bp, Cricetulus griseus
gctgcagacgccattatcctctgtttccccgctgcacggacgtcgccgaccgtcgtgctcgtctcgcgcccgggtgcggcctgcagattggtgtatccatttaattcaagaaaatggagaccgaacagccagaagaaaccttccccaacaccgaaaccaatggtgaatttggaaaacgccctgcagaagacatggaggaggagcaagcctttaaaagatctagaaatacagatgagatggttgaactgcgcattttgcttcagagcaagaatgctggggctgtgattggaaaaggaggcaagaatattaaggctctccgtacagacgtaagtat

SEQ ID NO: 1888 - DNA, 991 bp, Cricetulus griseus
tgctggcagccaatgggtcctccctgaaaaatggtggcactttgcatacttgtgccttaaggcctatgtacatctatggagagaaaagtccattaatttctgtcacaataatcagggccgtcaaaaatagtggtattctggatgttactggaaaattctccacagtcaacccagtgtatgtgaataatgcagcctgggcacacattctggctgccaggggcctacaagaccccaggaagtcaccaaacatccaaggacagttctactacatctcagatgacacccctcaccaaagctatgatgatttaaattacgtcctgagcaaggactggggcctccgccctgattccagttggagacctcctgtggccctgctgtactggcttggcttcctgctggaattggtgagcttcctgctgcgtccggtctacaactaccagcctcccttcaaccgacacttggtcacactctcaaatactgtgttcaccttctcctacaagaaagctcagcgagatctgggctatgagccccttgtcggctgggaggaagccagggagaacacttcagagtggatcgggtcactggtggagcagcacaagggaacactgaacacaaaggctcagtgatgtgactggcgatggcgggaacatgacctgggtgctgtcaggaaatagttgtcaggttctccagaagagacagaggcacaacccaggtcttactgcctccctttgacacagagatcaacttagtgtcttcctcaagacaccagcagctggtccctgacccagccacagggtttcttccctccacacctgcccagtgacacacatgtggctgtgcctcagctgctgtgacctgtgacaacaggcttcagcaattgcaatttcctgtcacatagagttcagtattggttttctttgcactctcaagttctatatcatatcctgcctttgagaaaatcccattgctttatgaagctcaacagaaatag

SEQ ID NO: 1889 - DNA, 565 bp, Cricetulus griseus
agcatctgggagaatggagacagcctggaagagctcatggaagaggttcaaaccttgtactactcagctgatcacaagctgcttgatgggaacccactagatggacaggctgaggtgtttggcagtgatgatgaccacattcagtttgtgcagaaaaagccaccccgtgagaatggccataagcagataagtggcagttccactggatgtctctcttctccaaatgcttcaatgcaaagtcctaagcatgagtggaaaatcgttgcttcagaaaagacttcaaataacacttacttatgcctggctgtgctggatggtacattttgtgtcattttcctccatgggcggaacagtccacagagctcgccaacaagtactccaaaactgagcaagagtttaagctttgagatgcagccagatgagctcctataaaagcccatgtctcccatgcagtatgcacggtctgggctagggacagcagagatgaatggcaaactcatagctgcaggtggttataacagagaggaatgtcttcgaacagttgaatgctatgatccacgtacag

SEQ ID NO: 1890 - DNA, 375 bp, Cricetulus griseus
agacccacatgctccgagagctgaggactgccttcagccaggtgaagactttctttcaaaagaaggaccagctggacaacatactactcactgactccttactgcaggactttaagggttacttgggttgccaaaccttatcagaaatgatccagttttacctggtagaagtgatgccccaggcagagaaccacgggccagaaatcaaggagcatttgaactccctaggagagaagctgaagaccctcaggaggcaactgcagcgctgtcatcgatttctcccctgtgaaaataaaagcaaggctgtggaacaggtgaaggataactttaataagctccaagagaaaggcgtcttcaaggccatgaatgaatttg

SEQ ID NO: 1891 - DNA, 673 bp, Cricetulus griseus
  misc_feature (615)..(634): n is a, c, g, or t
tgcatgcagaattgggctgtggttcccgaagcttctggctgtcaaaggcatttctgatattgctgacactgatcactgaaagggaactcgagaagcgatgcacatctcaaagctgccagctgctctcctcatcttctctgtggcactaaaccacttgaaggctacacctgtcagaagtggcaccaaccatcagatggacaaacggaagtgcaacacggccacgtgtgccacacagcgcctggccaactttttggtccattcgaacaacaaccttggtcccgtcctctcaccaaccaacgtgggatcgaacacgtacggcaagaggagtgctgcggagattccagacggggattctttggatctcttcctcctttagagtcggcatacttcttcatctcttgttattttgtgtgtaaatactctggcactttcacgaattatttaacagtgcctttttcatttctacttgtgagtgcactgcaacgtgttccatgctttctggctctgtgtgtgtaaaatcctcatcctaagaatggtttttaaactgagggctgaatcaagatcaggctgaagaccatgtctcttgacacaacatgttcttgaaatactgaaaannnnnnnnnnnnnnnnnnnncttataactttgtgattcaagtctaacaataaaggagac

SEQ ID NO: 1892 - DNA, 556 bp, Cricetulus griseus
gatctgtcctgcaataaactcagtactcttccgtcggatttctgtggtctcacacacctggtgaagctggacctgagcaagaacaagctgcagcagctgcccgcagactttggccgcctggtcaaccttcagcatttggatctcctcaacaacaagctggtcaccctgcctgtcagctttgctcagctcaagaatctgaagtggctggatctgaaagacaatcccctggatcctgtcctggctaaagtggcaggagattgcctggatgagaagcaatgtaagcagtgtgcaaacaaggtgttacagcacatgaaggccgtgcaggcggatcaagaacgagagcggcagcgccggctggaagtggaacgagaggcggaaaagaagcgagaggccaagcagcaagctaaggaagcaaaggaacgggagctgcggaagcgggagaaggcagaggagaaggagcgccggcgaaaggagtacgatgcccataaagcttcgaagcgagagcaggagaagaagcccaagaaggaaacaaatcaggccccaaaatctaagtctg

SEQ ID NO: 1893 - DNA, 599 bp, Cricetulus griseus
gatccggaaatctccttagctgactattggaaatgtacctcctgcaatgaaatgaatcctccccttccacctcwctgcaacagatgttggacyctkcgtgagaaytggcttccrgaagataargrgaargataraggggacrysyctgaagargccaarctggaggcagaaggcttagatgtgtcctgatggggaaaaaagctacakcgartgattstaaggagtcctgcactgaggarartgatgataargaaatatatacctcccagtcrcaagagagtgaggactattcccagccstcaacktccagcagcattgtttatagcagccargaagaygtcaaagagtgggagaaggaagagacascagacaaagargagartgtggaatctggcttctctcttaatgccattgaaccatgtgtgatttgccaagggcggcctaaaaatggttgcattgttcatggcaaaactggacatctcatgtcatgtttcccatgtgcaaagaagctaaaaaaaaggaataagccctgcccagtgtgcagacaaccaatwcaaatgattgtgctaacttattttagctagctgacctgcccataa

SEQ ID NO: 1894 - DNA, 420 bp, Cricetulus griseus
agaatgtcgcctgttcaccaagatccgaggccagttctcgtcgtggagtaatgagattgaggataatttccaaagtggttatgatgttttatataaagaagtctggaaatttgaaaagcaatatcgaggccgagagctgccagggtttgtgaactacaaaacatttgagaacatcataagacggcaaatcaaagtcctggaagagccagctgtagaaatgctgcacagggttactgaaatggttcgagatgcctttaccattgtttctgaaaaaaattttgatgagttttttaacctccacagaactaccaagtccaaacttgaagacctcagattagaacaagaaatggaagcagagaagatgatccgacttcactttcagatggagcagatcatctactgtcaggaccaagtttacag

SEQ ID NO: 1895 - DNA, 282 bp, Cricetulus griseus
gcttttctccgtaattctgcagggtcgtcctggcaaccagttgctcagccaatcagcacttggtactacgatccgccctcaacatctggagcaatggcggtaagaagagccctgattgtattggcccattcagagaggacatcgttcaactacgccatgaaggaggctgctgtagagattctgaagaagaaaggatgggaggtggatgaatctgacctctatgctatgaactttaaccccatcatttccagaaaggatatcacaggtaagctgaaggacgca

SEQ ID NO: 1896 - DNA, 570 bp, Cricetulus griseus
ctgcaggacagagagcgtgcgctcagagctcgagaggacagtctggagcagaaggagcgtgaactttgtattcgagagagactagcagaggacaaactggccagagctgaaagtttggtgaagaactacagcttgctgaaggagcagaggttcctgtgcctggctagtgacccagaccttgatcatccatccttagtaatgaggaagaaggttcatttccgtggggaaagcaaagagaacaccacaaggagtgagaattctgagagccagcttgtcaaatccaagtgcaaggacctgaagaagaggcttcatgctgcccagctgcgggctcaggccctgtcggatattgaaaagaactaccagctgaagagcaggcagatcctgggcatgcgctaggccagcaaggcatggagctgggccagtggtgggtactgccagcccactagagatttgtactcgactgctgtagttttgtgtgtctggttctgagctttgcctttgtgtgcagtgagcatgacgctgggattgtttgtgctctttttcagcagcaagtctacaataaggacatgt

SEQ ID NO: 1897 - DNA, 470 bp, Cricetulus griseus
  misc_feature (68)..(91): n is a, c, g, or t
aaagcacaagtcgagcagcggcggcctcctgctgcacgcgtccgaggccgagggctcgtcctgagcgnnnnnnnnnnnnnnnnnnnnnnnntgctgcgggatcccgggccgccccgaccgcgcccctcagccggtcacccccgggcccagcaccgcggctgctccccgggcctttactattttctaagatgtacatatctatttttttaacccagaaatcgtggcggggcctggggggataggacggcgcgttgacgagaaggaagggagcccgccgagtgcgccgcgttaaatgacgaacccgcatccccgcggctcccctggacccttcccacccgcggtgtcagtcaatccccacccccatccaggctcggtcccttgctctgtggtccctgagctccggggttcgtgtttgtgaagagtcgacagccagcgcctggtgggaatctccgagccacacagggcatctg

SEQ ID NO: 1898 - DNA, 487 bp, Cricetulus griseus
tcggaggccccaaagaagaacttatcccagagaaattggccaaggttgagactccattggaagaagctattaagtttttaacaccgttgaagaatttggtgaagaacaagatagaaactcatctttttgcctttgagatttactttaagaaagaaaagtttcttttgatgctacaatcagtaaagcgggcatttgctattgattctagtcatccctggcttcatgaatgcatgattcgactctttaattctgtgtgtgaaagtaaagacttacctgaaacagttagaacagtattaaaacaagaaatgaatcgtctttttggagcaacaaatccaaagaattttaatgaaacttttctgaaaaggaattctgattcattgccacacagattatcagctgccaaaatggtatattatttagattcttctagtcagaaacgagcaatagagctggcaacaacacttgatggatccctcaacaacagaaa

SEQ ID NO: 1899 - DNA, 508 bp, Cricetulus griseus
  misc_feature (55)..(55): n is a, c, g, or t
  misc_feature (417)..(417): n is a, c, g, or t
  misc_feature (456)..(475): n is a, c, g, or t
ttcttctcttctggaaagtgataagaaaaggaaaggtaggccaaagggcaaaggnaaacaaaagaaagcacagagcatcttcaagtaagtagatggagaagtagaagctgttctgcagaagaaagctaaagcaaggagtatagagttacagatttccagtgtgaagtttgaagatgttggaggcaatgatgcaacattaaaagaagtctgcaaaatgctcatacacatgcgccacccggaagtataccaacaccttggtgtcaccccgcctcgtggagttctcttgcatggaccaccaggctgcgggaagacattacttgcacatgcaattgctggggaacttgacttgccaattctgaaagtggctgcaccagagattgtgtcaggagtttcaggggagtctgagcaaaagctcanagatttatttgaccaagctgtgtcaaacgccccctgtannnnnnnnnnnnnnnnnnnngatgctattacccccaaaagagaagttgcttca

SEQ ID NO: 1900 - DNA, 533 bp, Cricetulus griseus
tcaactattgcatccctggtgtcaagtcaatgttggatcctgtcgatttatgctgggacggtgttacctggttacaggagaagtacagaaggctctggaatgtttctgtcaggcagcatctgaagtgggcaaagaagaattcttagatcgcttgatccgctcagaggatggggagattgtgtccactcccaagctgcagtattatgataaggttttacgtctactcgatgttgttggactgcctgaactggttattcagctggctacatcagcgattactgaagccggtgatgactggaaaagtcaggctactttaagaacatgcattttcaagcatcatttggacttgggtcacaatagccaagcatatgaagccttaacccatattcctgattccagcaggcagttagactgtttgcgacagctggtggtagttctttgtgaacgctcccaactgcaggatcttgtagagtttccctatgtgaatctgcataatgaggttgtgggaataattgaatcacgtgctagggctg

SEQ ID NO: 1901 - DNA, 416 bp, Cricetulus griseus
aggccaggcaactactttccagatgactcttaatggcaaacctgcacctccacctcagagccagatccccgaatggagcagttagggagggttgtggaactggacagtgacatggtagatatcactcaggagccagttttggattctgtgttagaagagtgtgtgcctgaggatcaagagccagtgtctgcttcgacacacattgcatcttcgctgggaattaatccacatgtcttacagatcatgaaagcatcattgcttgtggatgaggaagatggagatgccatggatcaacacttcagtcacttcccctccaaaggagatactgttcaagaaatctgttctcctagacgccctatttcagcctcccactcatcaaaatcccgttcaatcgttggtgggttgctgcaatcaaa

SEQ ID NO: 1902 - DNA, 235 bp, Cricetulus griseus
ctcttccggatcaccccggatggaaatgtgctcggggagcaacaagaccaagaagaagaagtcatcaagagtaccacttgacaaatccaagcaccagacggaagcaccccccctccagagagagcttttttcaatggatgtcgactcacagacccctatgtttgatgtcagcatgacagctgacgcgctggatacacctcatatcactccagctccaagccagtgtagtactccc

SEQ ID NO: 1903 - DNA, 572 bp, Cricetulus griseus
tcaaggagccccttcggtcagtcctccagtacaactcagccatgaaaaatgacacggacacgcctgctgaactgagtgagctgcgaagcaccatcatcaacctgctagaccctcctcctgaggtctcagccctcatcaacaagctggactttgccatgtctacctatctcttgtctgagtatcggctggaatacatgagggtgctgcgttccacacaccctgatcgcttccaagtaatgttctgctactttgaggataaagctattcataaagacaaatctgggatgatgcagggtgtcattgctgtggctgacaaagtgtctgatgccttcctgaacatgatggcagataaagctaagaccaaggagaatgaagaagagctggaacggcatgcccagtttctgctggagaacttcaaccacattcacaacaagataaggagggtggctgataaatacctgtctggtctggtggataagtttccacatttgctctggagtggaactgtgctgaagaccatgctggacatcctgcagaccctgtcactatcactaagggctgatattcacaag

SEQ ID NO: 1904 - DNA, 577 bp, Cricetulus griseus
ccctaagctgtgtccctgacactgaggtcctgacgctgtggagactctaggcgctgccggccggccgtggcttccctcctgggcctgagctacagcagaccctacagcagaacgttctttttacacttcaaaatgggatcctgtaagaaggttactctctcagtgctcagccgggagcagccagagggggttggagctcgggtccgcagaagcattggcagacctgagttgaaaaatttggatccgtttttgctgtttgatgagactaaaggaggaaggccgggagggtttcctgatcacccacaccgaggttttgaaacggtatcttaccttctggaagggggcagcatggcccatgaagacttctgtgggcatgttggtaaaatgaacccaggagacctacagtggatgactgcaggccggggcattctgcatgctgagatgccctgctcagaggagccagcccatggcttacagctgtgggtgaatttgagaagctcagaaaagatggtggaacctcagtaccaggagctgaaaaatgacgagatcccaaaacctaccaaggatggtgcgacag

SEQ ID NO: 1905 - DNA, 1367 bp, Cricetulus griseus
agaatctgctgagtgcccggaagagggccaaggctgagctggctcaggagacagaccccttgcggcggcaggtcttggatggacggcagctagcactgaaagtgagtgccaactctgtgtatggcttcactggtgccgaggtgggcaagctgccatgtttggagatctctcagagtgtcactgggttcgggcggcagatgattgagaaaaccaagcaactagtggagtccaagtacaccctggaaaatggctacaatgccaatgccaaggtggtctatggtgacactgactctgtgatgtgccgatttggtgtctcctctgtggctgaggcaatgtctctgggtcgagaggctgcaaaytgggtatctagtcacttcccatcacccatccgactggagtttgagaaggtttacttcccatacctgctcatcagcaagaagcgctatgctggcctgctcttctcctcccagcctgatacccatgacagaatggactgcaagggcctggaggctgtgcgcagggacaactgtcccctggtggccaaccttgttacatcctctctgcgacgaatccttgtggaccgggatcccgatggggcagtggcccatgcaaaggatgtgatctcagacctgctgtgtaaccgcatagacatctcccagctggtcatcaccaaggagctgacccgagcagccgcagactatgctggcaagcaggctcatgtggaactggctgagaggatgaggaagcgtgaccccggcagtgcgcccagcttgggtgaccgcgtcccctatgtgatcatcggtgctgccaaaggcgtggctgcctacatgaagtcggaggaccccctgtttgtgctggaacacagcctgcccatcgacactcaatactacctggggcagcagctggccaagccactgctgcgaatttttgagcccattctgggtgagggccgtgcagagtctgtgctgctccgaggagaccacacacgctgcaaaaccgtgctcaccagcaaggttggtggcctcctagccttcaccaagcgccgcaactgttgcattggctgccgctcagtgatcaaccatcagggagctgtgtgtgaattctgtcagccccgggagtcrgagctctatcagaaggaggtgtcacacctgaatgccttggaggaacgcttctcgcgcctctggacacagtgccagcgttgccagggcagcttgcatgaggacgtcatctgcaccagccgcgactgtcccatcttctacatgcgcaaaaaagtgcgcaaggacctggaggaccaggagcggctgctgcagcgttttggacctccgggcccmgaggcctggtgactcgacgagggacacggaataaag

SEQ ID NO: 1906 - DNA, 488 bp, Cricetulus griseus
  misc_feature (88)..(88): n is a, c, g, or t
  misc_feature (209)..(209): n is a, c, g, or t
ggcacatctcgtcatgtcaggcactgcttggctttagttcctcactcctccgcccacccgcctacccgaagccgcgcccaccgcccanagccagagggatggtggtagtcaccgggcgggagccagacagccgtcactgggacggtgccatgtccagctccgaagccgaagacgacttcctggagcccgccactcctacggccacgcangcggggcacgggctgcccctgctgccccaggagcatttcaggaagggaaccttgtgggtcccaagctaacctggacagtcctcgcttcccaccaagcctttgttgacttgcagattaatcaatcactatagattgagcaggagaggaatggagcacggtagacagtgagattcactctcagcagtagagctcctgcatagcatgtgaagtccctgaatgagaagaaaggaatgagcaccatgatgccccgatgcatttgaaagcagctattggtctctg

SEQ ID NO: 1907 - DNA, 524 bp, Cricetulus griseus
gtgaatagcgtcaggcacccctttctggtgaacctttttgcgtgtttccaaacaaaagagcatgtgtgctttgtgatggagtatgcggcaggtggggacctgatgatgcacattcacaccgacgtcttctctgaacctagagctgtattttatgcagcatgtgtagttcttgggttacaatatttacatgagcacaaaattgtttatagagatttgaagctggataatttgttgctagatacagaaggctttgtgaaaattgctgactttggtctttgcaaagaaggaatggggtatggagataggacaagcacattttgtggtactcctgaatttcttgccccagaagtattgacagaaacatcatacacaaaggctgtagattggtggggccttggcgtacttatatatgaaatgctggttggagagtctcccttccctggtgatgatgaagaataagtttttgacagtattgtaaatgacgaagtaaggtatccaaggttcttatctacagaagccatttc

SEQ ID NO: 1908 - DNA, 561 bp, Cricetulus griseus
ctacttcaaaatgaggttaatcggcaaggtgttgacatagaagcagctcgaaaagaagaagaaaggataatgcttatagatgcaaggcaatggttaaatagtggtcacatcaatgatgtccggcatgcaaaatctggaggcgccgcgctccacgtggcagctgccaaaggctatacagaagttttaaaacttttaatacaggcaggctatgatgttaatattaaagattatgatggctggacacctcttcatgctgcagctcattggggtaaagaagaagcatgtcgaattttagkggacaatctgtgtgatatggagatggtcaacaaagtgggccaaacagcctttgatgtarcagatgaagacattttargatatctagaagagttgcaaaaaaaacaaaatctgctccatagtgaaaaacgggataagaaatctccactaattgagtcaacagcmaatatggaaaataatcagccacagaagacttttaaaaacaaagagacgctgattattgagccagagaaaaatgcatcccgcatcgagtctctggaacaagaa

SEQ ID NO: 1909 - DNA, 485 bp, Cricetulus griseus
gctacaacagaggaaccaaggataaatcttacccagctcctagaagaagaagtggaattctgcacagatcttattaattcctatccaggacatgaaaccctttggtgtcataggcggcatgctttctaccttcaacatcacttaaatggcaagtgtcctcccaacgtgacgcacctgtcacctgcagactgctctggcggcactttgaatgacttgcacctgattccagcaagcccccaactgtctcaggcaatggaagtggatggactgaatgactccagcaaacaaggctattcccaggaaaccaagcgcttgaagcggaccccacctccagaccctgtaggcctagagatggagcacaggtttattgatcaagtgctatccacttgtcggaatgtagagcaagccaggtatgccaatgcatacaggaaatggctggtgactttgagtcagtaagaggggtggattcatcctaagaaattccc

SEQ ID NO: 1910 - DNA, 316 bp, Cricetulus griseus
ggcccctgcgcttatacaggctgcacaagggcgcactgcacacagtcagccatgaggacatcagggacctgaggaactccacaggctcccagggtggtgcagtgagtaatcctagcagcagtaatagtagccaggactccctccacaaagccccaaagaagaagggcatcaagtcctccattggccgcttgtttggcaagaaggaaaagggccggcctgggccactgggcaaggagtcaccaggacaagttggcgtttcacagacagaaaatccatctcaagatgccttgggactcagcaaactaggaggacaagc

SEQ ID NO: 1911 - DNA, 592 bp, Cricetulus griseus
aactacacagaattattggattgacatccacttackatggggagactatgatycccatgatatcgagcgctatgcccgggccaagttcctgggattataccacagacaacatgagtrkskacccttctcccacakgtgtgctcattgccattgacctggcctatwatctacacagtgcctatggaaactggtttccasgcagmaagcctcttatacagcaggctatggccaaratcatgaaggcaaatcctgccttgtatgtattacgygaacggatscgcwaaggactgcagttgtattcatctgagcccactgagccttatctgtcctctcagaactatggtgaactcttctctaaccagattatctggtttgtggatgacaccaatgtctatagagtgaccatccacaagacctttgaggggaacttgacaaccaaacccatcaacggagccatcttcatctttaacccacgtacggggcagcttttcctcaagataatccatacatctgtgtgggctggacagaagcgtttgggtcagttggccaagtggaagacagctgaggaagtggctgccctgattcgatctct

SEQ ID NO: 1912 - DNA, 424 bp, Cricetulus griseus
ttggccagtagacaagtctgttgtgcattctcttgattaaagactgatgtaggtaggctgatctcatgggatgtgattccacccgtgggtaggtggtcctgagtgattaaaaaaaaaagtgggctgagaaagccagtagtagcattcctccacggcccctacttcaaatcctgcctcaaagttcctgtcttgagtttctgctctaacttcctttggtgaatgactgttaatgtgaagtgtaagtagaaataaaccctttcctcctcaagttgcttttggttatggtgctttatcacagcattggaaacccaaactaagacagaaattggtattagattatatggtgtgctgctgtgacaaacctggctttgtgtttcagggaggattgtggtagcatttggactttgggccaggaaagccatta

SEQ ID NO: 1913 - DNA, 517 bp, Cricetulus griseus
  misc_feature (380)..(380): n is a, c, g, or t
  misc_feature (492)..(492): n is a, c, g, or t
gttaactcttttctagaagacagctttacaaggatctagaaggaccaaattcggggctccagaactctccagcgaccagcttagcagatcatacagtcttcaggagctgaaaattcctaagtctggtcttcaccgtgatttggaactttccagtctcagaaaagttgaccaagggactgcacaggactgagtccatatggaagaagaactacctggtttctatggagaaagtggcaagaaggaaaaaaaataaagcagacctcttagaaaataagattccttcatatgaggtgccagtacaggctaccctgtcatcattgaaaatgctagatgtggggaagtggccaatcttttccctttgttctgaggaagaacttcantcgattcgtcaggcttgtgtctttggcagtgctggcaatgaagttttatacaccacagtcgatgatgagatttttgtacttggcacaaactgcagtggctgtctggggatangtgatattcaaagcaccattgagcc

SEQ ID NO: 1914 - DNA, 185 bp, Cricetulus griseus
  misc_feature (118)..(136): n is a, c, g, or t
cagccacctggccaaggtgacggttgaagtggtcctggcgcacccgggcggcggctccacatgacgagccaactctttcgtactggccctggtagccggaactgctactcgaggctgnnnnnnnnnnnnnnnnnnntaaagggagaggaggagggagacggcgtcctataagacctagaaaccaa

SEQ ID NO: 1915 - DNA, 574 bp, Cricetulus griseus
  misc_feature (74)..(94): n is a, c, g, or t
gctcattttgctgatcctgacaccttaktcaactgggactttgtggaacaagtgcgcatctgtagccatgaagnnnnnnnnnnnnnnnnnnnnntctatccaccgactgcagccaagataacccgctgtggacacattttctgctgggcgtgcatcctgcactacctttcactcagtgagaaagcctggagtaaatgtcccatctgctacagttctgtgcataagaaagacctcaagagtgttgttgccacagaatcacgccagtacgttgtgggtgataccattacaatgcagctgatgaagagagagaaaggagtgttggtggccttgcctaaatccaagtggatgaatgtagaccatcccattcatctaggagatgaacagcacagccagtactccaagttgctgctggcctctaaagagcaagtgctgcaccgagtagttctagaagagaaagtagcactggagcagcagctcgcagaggagaagcacactcctgagtcctgctttattgaggccgctatccaggagggtaagattcgggaagaggctctgtctggagtacctggaggca

SEQ ID NO: 1916 - DNA, 489 bp, Cricetulus griseus
acagcgttccggaaagaatacattcctggaaacaaggaatttttgggggaaagggaaatacaaagacctttacctttcctaaaggatgggagactgggaaaaatgacgccaaacccaaaggacaccatgctaagggcttataaaggagacacgtctcagaactgggaaaaaggctgtcttgtgcttttgaaataaactgtcactctcaagcagcctgtcaatgctaaatgttaggacttctgtctctgctggagacacaacctggtgcatgtcagcgtttattgtttggcagctttctcatcactccctgactccgtttacctttactccgcatcccattctcttactgcctatctgaaggattggatgggcagagtatacgtggcggtggttggtcttccccgtatgttgtccatttaattccatagcactgattttttctgaatgtgctctgccctgggaaaatggacacatattcctcacaatggg

SEQ ID NO: 1917 - DNA, 329 bp, Cricetulus griseus
  misc_feature (116)..(137): n is a, c, g, or t
gatcctttgttcttccacagacatgtctgctctgatttcactcaggaaacgtgctcagggtagagaagcctttggctggtgctaaaatagtgggctgtacccacatcacggcccannnnnnnnnnnnnnnnnnnnnnagaaaacagagggacttctaataaaaaaaaagggaagaaaacattttttttattaaaaataaacatgcctttccttcctacctagccagtccaattgctgttagatagaatacaaccccctgttcaaacaatggtgtagcatgttttgcttttgttcatatactaaacccatttttagcacatctgcctgag

SEQ ID NO: 1918 - DNA, 361 bp, Cricetulus griseus
caatatctgcagacattaaggattataaactttatgatgtggaaactaagtgtgggttgcttcaagtgtctgaaggattgtcatttttgcatagcagtgtgaaaatggttcatggaaatgttactcctgaaaatataagggtgaataaaagtggagcctggaaaataatgggctttgatttttgagtgtcgtcaagcaatccttctgaacaagagcctaagtttctttgtgaagagtgggacccaaacttaccttcattgtgtgttccaaatcctgaatacttggctcctgaatacatcctctccgtgagcggtgagacagccagtgatatgtactctttaggcactgttatatatgctgt

SEQ ID NO: 1919 - DNA, 552 bp, Cricetulus griseus
  misc_feature (315)..(341): n is a, c, g, or t
gctgcacttcatagggacacagttgaaaggtgggacaagctgctgaccaaaaggctggtgaacctgtacatccccagagtctacatgtctggtacctacaacctcgaagatgtgctggagggcatgggcattacaggcttattcaccaaccaaacagatttcttagacatctcccaggatcctccacagaaagcatcaaagatagtccacaaggtcatgctgcaactggatgagaaagatgaaccgcctgttaccaccacagaggctcccccacagacaacatctgaaccgctcaccctcaccttcaacaaaccnnnnnnnnnnnnnnnnnnnnnnnnnnncacttggagcagcctgttgttgggcaaaatcatgaatccagcttagtgcatgctggagaagctatggtaccgcctgactttggggggtagaagcctttccccagtcttctccaggttcttccgaacccaactaggtatccctacttttagatatcctgtaatgtataaccattgttgctactcccaagacaggtcaactgataaagtagca

SEQ ID NO: 1920 - DNA, 547 bp, Cricetulus griseus
gaacgtgtttgctgggcagtcaaagatctatgcctacatgagtcccaacaaatgctctggaatgcgctcccctcttcaggaagagaactcagttgcacatcacgaggtcaaatgccaggggaaaccattagctggaatctacaagaagcgagaagagaaaagaaatggtgggagtacgatccgaagctctgtgaagtccgatgaacagaagatcaaagacgccaggagaggtcccctggcaccttttccaaaccaaaaatctgaagcagcagaacctccaaaaactccaccccagtcatgtgatcctacgaatacagtggttgccaagcaggccttgaaaaagcccctcaagggcaagcaggcccctcggaaaaagtctcaagggaaaacacagcagaatagaaaattggcagatttctacccggtgcgaaggagctctaggaagagcaaagctgagctgcagtctgaagaaaggaaaaaaattgatgagctgattgagagcgggaaggaagaacgcatgaacattgatctcattgatggaaaaggc

SEQ ID NO: 1921 - DNA, 556 bp, Cricetulus griseus
ccagcagagagttcggggacagcctgagtttggagattcttcagattattaaggagtcccagcagcagcatggcttacggcacggagacttccagcggtacaggggctactgttccagaagacaaagacgtgtccggaaaacactcaactttaaaatggggaacagacacaaattcactgggaagaaagtaaccgaggagctcctgactgataacaggtacttgttgctggttctgatggatgcagagagagcctggagctacgccatgcagctcaaacaggaagccaatactgagccccgaaagcgctttcacctgctgtcccgcctgcgcaaagccgtgaagcatgccgaggaactggagcgcttgtgtgagagcaaccgcgtggatgccaagaccaagctagaggctcaggcctacactgcttacctctcaagaatgttgcgctttgaacatcaagaatggaaagctgccattgaggcttttaacaagtgcgaaacgatctacgagaagcttgccagtgcgttcacagaggagcaggcagtgctgtacaagca

SEQ ID NO: 1922 - DNA, 337 bp, Cricetulus griseus
  misc_feature (195)..(195): n is a, c, g, or t
cacagtttctctggaatgcactttatcggtaccgggcctgtgaccactgtcttcgggcactggagaaggcagaggagaatgcacagaggctgactgggaaaccaggccaggttctcccacacccatagctgtgcattgtgcgcaaggggcggcaccataactgcccgcattgccaggtgatgtactgcagtgcanaatgccggctggcagctgcggagcaataccaccgagtcctgtgcccaggcccatcgcagggggacccccggcaccccctcaatatgctgcaggaggcatggaggagtgttcactatcctccggagactgcaagtataatgct

SEQ ID NO: 1923 - DNA, 502 bp, Cricetulus griseus
tgggcatagtgcttttagagccaacatgtaacagatggatgcaactccaagctgattgcttcttcatgccaacactcttttgactgtataggatctttgtctcttcatctttgatctggattgctggcaaataaaaggagttcatgtagtgttttgtttaagcttgagtcaccatgagtagtagtttaagcaaagaaaaagactctaaagagaaagatcccaaagggccatctgccaaggagagasaaaaagaggcaaaagcctccgrtaggttttgggaaagaaagcaaagaaaaagaccctaaacccaaagggaaagatgccaaagatggaaagaaggattccagtgctgcccaaccargggtggctttttcagttgacaatacgatcaaacggccaaacccagcacctgggactagaaaaaaktctagcaatgcggaggtgatgaaagagcttaacagatgccgggaggagaactcagcacgcttggacttatccaaga

SEQ ID NO: 1924 - DNA, 561 bp, Cricetulus griseus
gtcttcatttctcaagcagttcaagaccaagcgttattttcctaccaaggtacgatcaacaatcagtgactttgctgtgtttctcacaatagtaataatggttgcaattgactaccttgtaggaattccatctcctaaacttaacgttcctgaaaagtttgagcctactgatccaagtaggggctggatcataagccccctgggagataacccttggtggacattactaattgcagctgttccagctctcctttgtaccattctcatctttatggatcaacagattacagctgtaatcatcaatagaaaagaacacaaactcaagaaaggagctggctatcaccttgacttgctcatggttggtgtcatgttgggagtctgctctatcatgggcctgccatggtttgtggctgcgacagtgttgtctataagtcatgtcaacagcttaaaagtagagtccgaatgttctgctccaggggaacagcccaagtttctggggattcgtgaacagcgggttacagggctgatgatttttatcctgatgggcctctctgtgttcat

SEQ ID NO: 1925 - DNA, 562 bp, Cricetulus griseus
ctcccaaaggagaattgcagttgccgccgccgccacctccaggccactatggcgcctgggctgctcaagagcttcaggccaaactggcggaaataggagctccgatccaggggagtcgcgaggagctggttgagcggctgcagacctacacccgccagacgggcattgtgctgaatcgacctgttttaaggggagaagatggggacaaagctgctcctcctcctatgtcagcacagctgtctgggattcctatgccgccaccacctatgggactcccccctctacaacctcctcctccacctccaccacctccaccaggccttggccttggctttcctatggctcacccaccaaatttgggtcccccacctcctctccgagtcggcgagcctgtggcattatcagaagaggaacggctgaagctggcacaacagcatgcagctttgctgatgcatcaagaggaacgtgccaaacaggcaggtgcgctaatggatcatgaacggcatcaggagattgccaatatgggcactgcagtccctcggcctcctcaagatatgggcca

SEQ ID NO: 1926 - DNA, 568 bp, Cricetulus griseus
cattttcttctctccctggacaggcatcgagttgcctgagtgtattcagagcactctggacttgctgtctargcatgttcctgtctcacagatgcagcgctcatgggctcggaactgctgtgtcactttatcgagcagagccaggtgcctctcttctgtgccctctagatcctctctctctacctctaccccaagtgcctctgccaccgtgacttcagaaaagcttggcagtccctctagcaacatcctaagttcagagattgtctggttggtgagttaatagctcagccgaatgctcacattgtctcagtgaggcaactactgaccaagatggttcattgttgcctctgtgagtcagagtagacagcacatttgtttttccttgcacgcttggcaagtggctctggctgattaatatatgcaggtggtggtacaaatgcttgtgaggttccccattttatccctgtacaaacaccagaagcgtgggcaattgcccaagaagaggccctgcttcctgaagccaggtgtgatgcaaagtttgaactgaaatgtggtagctcaggtgaca

SEQ ID NO: 1927 - DNA, 366 bp, Cricetulus griseus
agcgatatcgatcctctatcaatgacaaaatcatagagttgaaggacttggtcatgggaacagatgccaagatgcacaaatctggcgttctgaggaaggccattgattacatcaaatatttgcagcaggtcaatcacaagcttcgtcaggagaacatggtactgaagctggcaaatcagaaaaacaagctcctgaagggcattgatttaggcagtctggtggacagtgatgtggacttgaagattgaagactttaatcagaatgtccttctgatgtctcccccggcctctgactcggggtcccaagcaggcttctctccctattctattgactctgagccaggaagtcctctgctggatgatgcaa

SEQ ID NO: 1928 - DNA, 555 bp, Cricetulus griseus
tggtggccatcaagaaaatgtcctatagtgggaagcagtcaaatgagaaatggcaggacatcatcaaggaggtgcggttcttacagaagctacgacatcccaatactattcagtaccggggctgttacctgagggagcacacagcttggctggtgatggagtattgcctgggctcagcttctgatcttctagaagtgcacaagaagccccttcaggaggtagagattgcagctgtgactcatggggcacttcagggcctggcatatctacactcgcacaacatgatccatagggatgtgaaggctggaaacatcttgctgtctgaaccaggcttggtaaaattgggggactttggctccgcatctatcatggcacctgctaactcctttgtgggcactccatactggatggctccagaggtgatcctagccatggatgaggggcaatacgatggcaaagtagatgtctggtccttggggataacctgtattgagctggcggagcggaagccaccactgtttaacatgaatgcaatgagtgccttataccacattg

SEQ ID NO: 1929 - DNA, 399 bp, Cricetulus griseus
aaactggccattttggcagagcagtatgaacagagtataaatgagatgatggcttctcaggcgttacggctagacgaggcgcaggaggcagagtgccaggccttgagactacagctgcagcaggagatggagctgctcaacgcctaccagagcaaaatcaagatgcagacagaggcccagcacgagcgcgagctgcagaagctagagcagagggtgtctctgcgcagagcgcatcttgagcagaagattgaagaggagcttgccgccctgcagaaggaacgcagcgagagaatcaagattctcctggaaagacaagagcgagagacggagacttttgacatggagagcctcagaatgggatttgggaatttggtgacattagattttcctaaggaggac

SEQ ID NO: 1930 - DNA, 555 bp, Cricetulus griseus
agtccgcggaatgacccgctcgcggctcgccgcctcggccgcccacgacccctagacaccgacacccgccctaggatcaaaccactggcgcagaccggtcccgccacgccgagcctgtggtccgttctaagggcggctcgcctgaggatttgtagatactgagtcgaagttggggctaatccacatcatggaaatggaaaccactgaacctgagccagactgtgtagtacagcctccctctcctcctgacgacttttcatgccaaatgagaatctctgagaagatcagtccattgaaaacttggtttaagaaaaaacaggatcagaaacgattgggaactggaaccctgaggtctttgagaccaatattaaatactttgctagaatctggctcgcttgatggagtttttagagctagagaccaaaatgcagatgagagcagcttacatgaacgtatggtgaaaaaacccctggaactcaacccatcatgttcaccagcagaaaacagtatgtctgtcctgattcctgatgagacaaatgttgagggccagttacc

SEQ ID NO: 1931 - DNA, 579 bp, Cricetulus griseus
agctgcccacaatgaatggctctgaaggtcgscccgagttctatgacttcgacctcatcatcattggtggaggctcaggaggactggcggcagctaaggaggcagcaaamtttgataagaaggtgctggtcttggattttgtcacaccaactcctctcggaactagatggggtctgggaggaacgtgtgtgaacgtggggtgcatacctaaaaagctgatgcaccargcggctttgttaggacaagccttgaaagactctcgaaactatggatggaaagttgaggacacagttaagcmctgactggkagawgatsacasagkctgtgcasaatcacmtcggctcsctgaattggggctaccgagtwgctcttcgggaaamgaaggtctactatsagaactgcctatgggaaattcatyggttctcacamgattamgtgcwaaaratarcmmmkgawmmgcaaaaaatttwttcagcaragcggkttctyatygccmcykgggaaaggscmcgctacctgggcatccctggagacaaagagtactgcatcagcagggatgatctttttctcctgccttac

SEQ ID NO: 1932 - DNA, 563 bp, Cricetulus griseus
  misc_feature (139)..(172): n is a, c, g, or t
acttcactgaggatgtcaactctgcttttgagttcctgttgaagctcacgcccttgttggacaaagctgaccagcgctgcaattgtgactgcacaaatttcctcctccaagaatgcaacaagcagggacttctgtctgnnnnnnnnnnnnnnnnnnnnnnnnnnnnnnnnnnaacagatcgggacccccagctaaaatcatcagaaaatgccaacatccagcctaaccctgggctgatcctccgggcagagcccaccgtcacaaacattctcaagacgatggatgcagaccactccaagtccccagagggactgctgggggtcctgggacacatgctgtccgggaagagcctggacttgctgctggctgssgckgctgccactgggaagcttaagtcctttgcccggaaattcatcaaggcaggagctgcagctgatctcacttctgccacagccaccgctacctcttcggaagggccaggaaggagggtgaggctgtgccatgaaacctcacccagtagctgccgagaacccccgcaacccctcatcgctggagccggagat

SEQ ID NO: 1933 - DNA, 206 bp, Cricetulus griseus
taaatcttcctttctggcaagcttgaatccaaaaacatggggaaggttaagtgcacagtccaacagcaacaacatctatcctacacgatctgcaggagtcagtggtcttgctcggtcatcctcaaaagacaccatatccaataatagagaaaaaattaaaggctggattaaggaacaggcacataaattcgttgagcgttacttta

SEQ ID NO: 1934 - DNA, 452 bp, Cricetulus griseus
  misc_feature (75)..(92): n is a, c, g, or t
  misc_feature (157)..(157): n is a, c, g, or t
tcattagtggtttccgttccattattaagcctgagtggatccgaatgttctccacccctgagcttcatcgtctcnnnnnnnnnnnnnnnnnngagatggatctggaagatttaaagaagcacaccgtgtactatggaggctttcatgggagccacanagtcatcatctggctctgggatattctggcttccgacttcacacccgatgaaagagcaatgttcctgaagtttgtgaccagctgctccagacccccactcctaggattcgcctacctcaagcctcccttctccatccgctgtgtggaagtgtcggatgaccatgacactggggacaccctgggcagtgtcctcaggggcttctttactatccgcaagcgggagccaggtgggcgtctgcctacttcttccacctgcttcaacctgctcaagctgcccaactacagcaagaaaagt

SEQ ID NO: 1935 - DNA, 503 bp, Cricetulus griseus
gttgataccgtaaagcgtttgctcattaaaaagttacctcctgttcttgctatccaactaaaacgattcgattatgactgggaaagagaatgtgcaatcaagttcaatgattactttgaatttccccgagagttagacatggaaccttacacagttgcaggtgttgctaagctggagggggataatgtaaacccagaaagtcaactgatacaacagaatgagcagtctgaagagaaagcaggaagcacaaaatacagacttgtgggtgtgcttgtgcacagtggtcaagcaagtggaggacattactattcttacatcattcagaggaatggaggagatggtgaaaagaatcgctggtataaatttgatgatggagatgtaacagagtgcaaaatggacgacgatgaagaaatgaaaaaccagtgttttggtggcgagtatatgggagaagtattcgatcacatgatgaagcgcatgtcatacaggcgccaaaaaaggtggtg

SEQ ID NO: 1936 - DNA, 222 bp, Cricetulus griseus
agtatttgaagcttccacagctggttgatatggctgctcagattgctgatggtatggcatatatagaaagaatgaactatattcatcgagatctccgtatctgctaatattcttgtaggagaaaatcttgtatgcaaaatagcagattttggcttcccaagattaattgaatacaatgaatacacagcacgacaaggtgctaaatttccaatcaagtggaca

SEQ ID NO: 1937 - DNA, 495 bp, Cricetulus griseus
  misc_feature (438)..(438): n is a, c, g, or t
tgctcaggttgctccgtgcgcttctccctcacagagagacggcaccattgcaggaactgtgggcagctcttctgtcagaagtgcagtcgatttcagtcagaaatcaagcgcttgaaaatctcatccccagtgagagtctgtcagaactgttactacagcttacagcatgagagagggacagaagatgggcctcgaaactgccgagactgagggagaccacggatggcccagggagctctttgggtcctgccacggcttcgaaggcattgaagcagtctctatttaccacacacctcttcacgctgagtgtttgaagtgttgagttcaaagggatcattggatcacgggttccaggccagtgactggcaggcactatgcagtgaccagcacaagaagaaagcaaggtggttcctgagggtgtttcagaacctgggtctnccatagtgtagccatctccaagagcaaactccgtgcgccccaactgtctttcttgca

SEQ ID NO: 1938 - DNA, 301 bp, Cricetulus griseus
  misc_feature (116)..(138): n is a, c, g, or t
atccaggcagtattttatcactgcaggattaagggtatgttcacgtttatgatgtgaggtgcctcgaattccaggggaagccagcctatgatctctttggctgaacactccaagannnnnnnnnnnnnnnnnnnnnnncctgttacgggtaacagattggtgaccacatgtgctgactgcaagctgacagtctttgacagcagctctttatcttcccagattccttttcttactaccattaggcgtaacactatcactgggagatggctaacgaggttccaagctgtgtgggaccctaaac

SEQ ID NO: 1939 - DNA, 451 bp, Cricetulus griseus
ttttaagtcctggttgatgggccgtgctactaggagcatggacaacagtggtgcctagggtgatttgaattgtggagacttggctcaaagaggttaatgagggaaagacttcttagtatgttgactagaggtttttcttgtgatatttgggggagagaatgtagttgtgttctgccatattgagattcttatcatgtattgagaaataaaactggggaataaatattaaggaataaacataagaaatcccagcatgactgagacaacattcgccctctctacttcctcaatctaagagtgcccacaaccccttgaccccatctcttcctctcatgtgtgctttcctctttcttttcttagtttctcagagaactcaatagtctattctggtcagctgaatgtggactttaccctctgaatccaggtaagctccaatgatgggttaacccta

SEQ ID NO: 1940 - DNA, 1202 bp, Cricetulus griseus
aactcctcagattcggggtagaaatatcgctgtccaggagccaacaagtgtgcttgaagaggcccggctgatgctgcatgtttctgctgtgcctgactctcttccctgtcgagagcaggaattccaagacatctatagctttgtggaaagcaaacttcttgatgggactggagggtgtatgtacatttctggggttcctgggacagggaagacggccactgtaaacgaggtcatacgctgtctgcagcaggcagcccaaacaaatgatgttcctccctttgaatatgttgatgtcaatggcatgaagctgacagagccccaccaagtctatgtgcagattttacagaagctgacgggccagaaggcaacagctaatcatgcagcacaactactggcaaagcgattctgcagccaagggtcccaacaggagaccactgtgctgcttgtggatgagcttgaccttctttggacttccaaacaagatgtcatgtacaacctctttgattggcctactcacaaaggagcccggctgatagtcctggccattgccaacaccatggacctgccagagaggatcatgatgaaccgtgtatctagtcggctgggtctaaccaggatgtccttccagccctattctcacaaccagctgaaagagatcctagtgtcccgactcaagcatttaaaggcctttgaagatgatgccatccaattggtagccagaaaggtagcagccctctctggagatgcacggcgctgcctggacatctgcaggcgtgccaccgagatttgcgagctttcccataatcatggcaactctctgggcccagtgactgtgtcccacttaatggaggctatagatgaaatgttctcctcatcctacatcactgccatcaaaaactgttccctcctggaacagggcttcctgagagccattattgcagaattccgtcgatctggactagaggaagcaacatttcaacagatatacagtcaacatgtggctctgtgcaggatggagggactgccttaccctaccatgtcggagaccatggctgtgtgctcaaatctgggttcttgtcgcctcctcctggtggagcccagcaggaatgacctactacttagagtaaggctcaatgtgagccaggatgatgtgctctatgctctgaaagaagagtgaagagcttcacagacttctgctgttt

SEQ ID NO: 1941 - DNA, 93 bp, Cricetulus griseus
ctttcttcttcccaggaacaccatggacgccctgccagcctgcctgctccgggatgtggcccaggaggccctgggtgcggctgtcattggcat

SEQ ID NO: 1942 - DNA, 1319 bp, Cricetulus griseus
  misc_feature (434)..(448): n is a, c, g, or t
  misc_feature (572)..(585): n is a, c, g, or t
  misc_feature (587)..(599): n is a, c, g, or t
gcctgctgggagctctactgcctggaacatggcatccagcctgatggccagatgccaagtgacaagaccatcgggggaggagatgactccttcaacaccttcttcagtgagacaggcgctggcaagcatgtgccccgggctgtgttcgtagacctggaacccacagtcatcgatgaagttcgcactggtacctaccgccagctcttccaccctgagcagctcatcacaggcaaggaagatgctgccaataactatgcccgtggccactacaccatcggcaaggagatcattgatcttgtcttggacagaattcgtaagctggctgaccagtgcacaggtcttcagggcttcttggttttccacagctttggtgggggaactggctctgggttcacctccctgctgatggagcggctctctgtcgattatggaannnnnnnnnnnnnnnagttctccatctacccagccccccaggtttccactgctgtggttgagccctacaactccatcctcaccacccacaccaccctggagcactctgattgtgccttcatggtagacaacgaggccannnnnnnnnnnnnncnnnnnnnnnnnnncattgagcgccccacctacactaaccttaaccgcctcattagccagattgtgtcttccatcactgcttccctcagatttgatggagccctgaatgttgacctgacagaattccagaccaacctggtaccctaccctcgcatccatttccctctggccacatatgcccctgtcatctctgctgagaaagcctaccatgagcagcttacagtagcagagatcaccaatgcttgctttgagccagccaaccagatggtgaaatgtgaccctcgccatggtaaatacatggcttgctgcctgctgtaccgtggggatgtggttcccaaagatgtcaatgctgccattgctaccatcaagaccaagcgtaccatccagtttgtggactggtgtcccactggcttcaaggttggcattaattaccagcctcccactgtggtacctggtggagacctggctaaggtccagagagctgtgtgcatgctgagcaacaccacagccatcgctgaggcctgggctcgcctagatcacaagtttgatctgatgtatgccaagcgtgcctttgtgcactggtacgtgggtgagggcatggaggagggggagttctctgaggcccgtgaggacatggctgccctagagaaggattatgaggaagttggggcagacagtgctgaaggagatgatgagggtgaagaatattagcccatgtgctgcaattttacact

SEQ ID NO: 1943 - DNA, 580 bp, Cricetulus griseus
  misc_feature (410)..(431): n is a, c, g, or t
  misc_feature (449)..(462): n is a, c, g, or t
  misc_feature (464)..(476): n is a, c, g, or t
gtgctgtcattttcagatggcggaagccggcttcatccactgccctaccgagaacgagcctgacttggcccagtgttttttctgctttaaggagctggaaggctgggagccagatgacaaccccatgtaagtccctggtgccccggttccaatgggaacttactgggttgaactggagttggggggaaaacgatttgaatttagtaggagagcatggtcttcctaactcgttacgtgttccaggctgtccttgaacttgttatatacctaagactagtcttgagttctccatatctgcctcggtttccctagtgctgccagcttgcatggttttgcctgaggtatttgttttgatttttgtttgtttgggatgggtttctctatgtagctctggttgttcaagaactttnnnnnnnnnnnnnnnnnnnnnnaaactcagagattttcgnnnnnnnnnnnnnncnnnnnnnnnnnnngtggtgtacgccaccacggcctggcctgcctgagatattttaagattcaggtgtttgtttgttttggctaatatgccacatgcatgtcttcatttctgccaccg

SEQ ID NO: 1944 - DNA, 1317 bp, Cricetulus griseus
tgctgatgatgtcatcaagatgctcaacatgggcagtgcctgcaggacttctggacagacttttgccaactccaattcttcccgctcccatgcctgcttccagattcttcttcgagccaaagggagattgcatggcaaattctccttggtggatctggcagggaatgaacgaggggctgacacttctagtgctgaccgccagactcgcatggagggtgcagagattaacaagtctctcctagcactgaaggagtgcatcagggcgctgggacagaacaaggctcacaccccattccgtgagagcaagctgactcaggtgctaagggattcattcattggggagaactcgaggacttgcatgattgccatgatctcaccaggcataagctcctgtgaatatactttaaacacgctgagatatgcagacagagtcaaggagctgagcccccacagcgggctcagtggagagcagccaattcaaatggaaacggaagagatggaagccagctctaatgggacctcgctggcagtcaatttcaaggaagaagaggagctgtcttcccagatgtccagctttaatgaagccatgagtcaaatcagggagctggaagagagggccatggaggagctcagggagatcatacagcaaggaccaggctggcttgagctctctgagatgactgatcagccagactatgacttagagacctttgtgaacaaagcagaatctgccctgactcagcagactaagcacttctcagccctgcgagaagtcatcaaggccctgcgtgtggccatgcaactggaagaacaggctagcaaacagatgaacagcaagaaacggcaccaatgatgacttcaataaagatctgtttatgtcacaccagcctcttcccctatccagcaaactttgggcaccttctggctttggttagggactgagttggatgggttttggtaaatgccaggtaaggggcatcaggcccaggaagactcggagagagaattgctgttctcttgcttagtttggagcaggaggaaggagcttttcatgactgcttccccttttcctccctatcagagggggtgctgtttgggtagtctccctgcggcagcaccctgcccctctgcaacagctgctgatagacaacctgcaaggtccaggctctgggagagaaattggtcctcgtccagcttctactgcctttggtctgtggtatcacccttgctctgagcactcttgtgtcagaaaaaaaaaagtttttgagacctctgttttagttttagaaatccaagatttccatttcctgctgtatg

SEQ ID NO: 1945 - DNA, 563 bp, Cricetulus griseus
ccattgttctttaagtgtagctaggggctgactcatatctcagggttttccatgtttgtgaagtggacagttctttgactaggatgtgacttactgtttcccatagtgatgcgaaaaccagcatggaatgacatggtttgaagctggtggaggattaggagcctcatgggcacactgtttctgtacggataagctgtgtctgggcataagatggaggcagaacagacactgcacaggagcaggttgccactctggggaggttctgttcagcaatctgtggttttgatatatatcaaaatcttgtgtaatcaaaagttttcaaagcttcacagtaaatttggacatacacactaaatttctaagaatccaccctcttgtcacactggtaagacataatttgaaaatgaaagcgacagctccatcattaagtgtgttccatgaggatcaggggatttggcttcagtgtctgcctttgccatatgtcatgtagggttctctgggccatggtcccttctctgtagctgatagtcctactctacagctgtcagtctttatcacaaatg

SEQ ID NO: 1946 - DNA, 457 bp, Cricetulus griseus
tgagcagctttgtgaagagatccaggagtctaggaagaaacgaggttgtagttcctccaaatatgcaccatcttattaccatgtcatgccaaagcagaattctcctcctgctggtgataaaaggtcagctcaagagcccagtgaaaagctgaaggcaccgtgtcctcctgtggcttgcagtacccctgctcagttgaagaggaaagttcataataagtcaaagtggcatgtaggtaacaaaataaagcgaaggaaactttcacaagcaaaagacaatggccaaactgctgtgaataatcaagtcaggagtagtgatacggaggaaagtcagcccacaagcacagagcacaatgagctgggaaacacgggagagtcttccgtagaagagaatgagaagcagaatgtctccgaaaacaacctagacctgaaaaatacctcgagtacctccaatattgag

SEQ ID NO: 1947 - DNA, 570 bp, Cricetulus griseus
ctttcagcctacagagaccccaggactggagaagagctcatcagaaatgagtactatgttactagagcttcagagcctgtgttctctgctgcaggagtctaaagaagaagccattggggccctgcagagaaaaatctgtgaattgcagactagactgcaggaccaagaggaagagcatcaggaagccctgaaggcaaaggaggcagacatagagaagctgaaccaggccttgtgcttatgctataagaatgaaaaggagctccaggaagtgatacagaagcagaacgagaagatcttagggcagatagacaagagtggtgagctcataagtctcaaggaggaggtgacccagctcacacgtttactgcggcatgcagagacagagacgaaagtgctccaggaagctctggagggccagctagaccccagctgtcagctgatggctactaactggatccaggaaaaagtctctctctcacaggaggtggacaagctgagggccatgttcctggagatgaaaaacgagaaagcaaaactggtgatcaagtatcagagccataggaacattct

SEQ ID NO: 1948 - DNA, 444 bp, Cricetulus griseus
ctgacagcggtctccgttagatcgagtgatggcgcagcagctcgcccgagagcaaggcatcaccctgcgcgggagcgcggagatcgtggccgagtgggtttcgtttggcgtcaacagcattttgtatcagcgtggcatatacccgtcggaaacctttactcgagtgcagaaatacggactcaccttgcttgtaactactgaccccgagctcataaagtatctcaataatgtggtcgaacagctgaaagagtggctctacaagtgctctgttcagaagctggtggtggtcatctcaaatattgaaagtggtgaggtccttgaaagatggcagtttgatattgagtgtgacaagactgcaaaagaagatggtgtttgtggagaaaagtcacacaaagccattcaagatgaaatccgttcagtgatcaggcaaatcacagctaccgt

SEQ ID NO: 1949 - DNA, 578 bp, Cricetulus griseus
cgaatagatttccaaggcagaaggggttgaaggcaagcccatgactgctatcacgggccatgggcatggcagatgggcccagccattgctgtgcagagtgtagcaatagagagcccctcactgtcgcatggccctccccagagcatgcccaacccaggagtctgtctcattgtttatctaaccaccaagagagcccctcccttaaaacagtatgccctcacaaacctaccatgtgaatgaactgggaaaggggcatgacccccaggtgtgtatagctgtgagtttcaataatctagcactatgttggacccactccccttccacccagccagctttgctgtcagatacaagtcctgttccctgtttgtcctcttccagggactgtagcctggaggcttccacacagcccacacatctcttaggctccattataatcactttcctagagacgctggcctgtctgtgaaggctgagcttgtgtgtggtgttgggtttatgcctcctgctccctcccaccctgtatctgggcatagttcacatcaagtgtgtatccgccaggctccaggacctttctggat

SEQ ID NO: 1950 - DNA, 96 bp, Cricetulus griseus
gaagatccctgggctgagatgggattgtccagtgggtggggcagagggtatcttctcacgaaatgaactctgtatggaaattgtcccttttctgac

SEQ ID NO: 1951 - DNA, 547 bp, Cricetulus griseus
  misc_feature (469)..(469): n is a, c, g, or t
tgccggatcctagagctgccgctggaagcagaggcttgtgaggggaggcggagagaaaaggggtgcgggaaatttaaaaagatgggaaaggcgcttcccattttccttagcccctttcctgttgatttctggagcaacgctcctttcttctcggacgaagagaatgaagaccctgctttatttaacagtcatcttaggggaagtgccatcgttcttccagaagggagatctggccccagatcttggattctgagaccagtgcgagatccccgctttgcgccctgtccgccctggagctggatttgtcatcagtttagaatagcttggctacgatgtgtggtgtggatggatggacgggcctcgcaagtgcaaacaggacaatccaggttacctggcaaagcaaccaccagtgcaacagctctccaagatgaagcctaggtcactcactgacatggctaaaagcatctangaagtctggatcattgtggtgcctctctccagaaaatggtgacaaaaatggaaatcaaccagcacatcaggatccttg

SEQ ID NO: 1952 - DNA, 545 bp, Cricetulus griseus
  misc_feature (520)..(520): n is a, c, g, or t
ccactacatacaaggggcattttatccacgaggaggttccagtgagattgccttccatatcatccctttgattcagcgggccgggggcgctgtcctcactagggccactgtacagagtgtgctactggactccactgggagagcctgtggtgtcagtgtgaagaagggacaagagctggtgaatatctattgccccgtggtcatctccaatgcaggaatgttcaatacctaccagcacttagtgccggagagtgcccgctgtctgccagatgtgaagaagcagctggcaatggtacggcctggcatgagcatgctctcaattttcatttgcctgaaaggcaccaaggaggacctgaagcttcagtccaccaactactatgtttattttgacacagacatggacaaagcgatgcaacactatgtctctatgcccaaggaaaaagctccagaacacattcccctttcttttcattgcctctccatcaaccaaggacccaacctggggaggaccgattcccanaccgatccacaatgactgtgctggt

SEQ ID NO: 1953 - DNA, 563 bp, Cricetulus griseus
  misc_feature (483)..(499): n is a, c, g, or t
gcccctgtttggtggcctttctggcaaaagaatagagagatggtttataaagtcaaattggtggaatggcttagccaagaactagaagtttctgtcctggaggacccgggagataggctgacatcagcagaaattctgtcatacatcaccgagatgtctctcatggaggcctcctgctggactctgctggactctcactcacagccaaggcagcttttctggagtttctctggattcttcagagccaaagatgaaaatgccccacaagctgtaaggtcaaagggcacacccaccacagtgctccagcaagggcgtgttttttaggactccccccagtgcacacaacgtttcttgtaaatgtaataggtgagggatgcatgcggccccttaccatatgactcagtcaagcttcctccgaattagagacttttggggaagttctctctattgatgatcagcactagggaacagaacagaacatcnnnnnnnnnnnnnnnnngcagctttgaccctcgctggagtggtcccctctcaacaaatttccccacagtgttttccaggtg

SEQ ID NO: 1954 - DNA, 558 bp, Cricetulus griseus
gtttccactttaccagcgttcttgcaaactttgaccgccggcgccggaaatactacgcatgcgccatccctttgcatggtgagcctcctgattctagctgccgcagcggcaactgtggtgatcttgctgctagtcgtgagactatgggcggtcattcggccccttcacgtcgtttcccgagagtctctcacacccttgatagtagctggatccggtgaacataccactgagattctgaggctggttggaagcttgtccggggcttactcacctaggcactatgtcatcgctgactctgatgaaatgagtgccaagaaaattgaatcttttgaacatgctcgaaccaagagagactctcctcctgagcactgccttcaccgaattccaagaagccgggaagtgcggcagtcctggctctcctcggtgttcaccaccttgcactccatgtggttttcctttcccctggtttaccatctgaagccagatttggtgctgtgtaatggaccaggaacatgtgttcccatctgtgtgtctgccctgctccttgggatacttgga

SEQ ID NO: 1955 - DNA, 556 bp, Cricetulus griseus
ccatcattgcagaccggattgcactcaagcttgttggccctgagggcttcgtagtgactgaagcgggattcggagcagacataggaatggaaaagttcttcaacatcaagtgccgatattctgggctccagccacacgtggtggttctcgttgccactgtcagagctcttaaaatgcatggcggcggccccacggtcactgctggactgccccttcccgaggcttacaccaaagagaacctggacctggttgaaaagggcttcagtaacttgaggaaacaaatagaaaatgctaggatgtttggagtgcccgtggtcgtggccatgaatgcattcaagacagatacagacgctgagctggacctcatcgcccgcctctccagagaacacggggcttttgatgctgtcaaatgcacccactgggcagaaagggggcggagagccttatccctggctcatgccgtccagagagcatcacatgcccccagcaacttccggctcctctatgacctcaagctctccattgaggataaaatcaggatcatcgcacagaagat

SEQ ID NO: 1956 - DNA, 559 bp, Cricetulus griseus
  misc_feature (270)..(291): n is a, c, g, or t
catctgaatgagagtggtgacccgtcatcaaagtccacagagatcaaatggaaatctggaaaggatttgacaaaacgctcaagtcaaacacagaataaggccagcaggaagaggcagcacgaagagccagagagcttctttacctggtttactgaccattctgatgcaggtgcagatgagttaggagaggtcatcaaagacgatatttggccaaaccccttgcagtactatttggttcctgatatggatgatgaagaaggagaggcagannnnnnnnnnnnnnnnnnnnnngaggaggaaggcttggaagatattgacgaagaaggggatgaagatgaaggtgaagaagatgaagatgatgacgagggggaggaaggagaggaggatgaaggcgaggatgactagcacagaagactgatggattccaaccctcttttttattttcttttattttcaattttctccagtccctgggagcaagttgcagtcatttccctcccctccccaatccctcttgtgctcagtcgccctgtttttgaggtctcttctcaacaccatg

SEQ ID NO: 1957 - DNA, 555 bp, Cricetulus griseus
tccaaaccggcctctgtgaagaaagcagccgccgcccagagcagcagctcctccgaaagttccagtgacgaggatgagaagcccaagggcaagggcactgctaaaccacaggccagcaaggccaatggcactccagcttctcagaatggaaaggcaggcaaggaaagtgaggaggacgaggaggaagaagagacgaaaatggcagtttccaagccaggaaagaaacagaagcggaatgagacagcagaggaagcagggacgcctcaagctaagaaagttaagctccagactcccaacacatttccaaaaaggaagaaagcagaaaaaagggcatcttccccattccgaagggtcagggaggaggagattgaggtggatgcacgcgtagcagacaattcctttgatgccaagcgaggtgcagctggagactggggtgagagagccaatcaggttctgaagttcaccaaaggcaagtccttccgccatgaaaaaacgaagaagaagcgaggcagctaccggggaggctccatctctgtccaggtcaattctgtcaag

SEQ ID NO: 1958 - DNA, 566 bp, Cricetulus griseus
  misc_feature (57)..(72): n is a, c, g, or t
aaagtgctctacagccagaaagccacgcctgggtccagccggaagacttgcagatannnnnnnnnnnnnnnngacaggatacttgatgcccctgaaatccgaaatgactactacttgaaccttgttgattggagctctggaaatgtactggctgtggcactggacaacagtgtgtacttatggaatgctggttctggtgacatcctgcagctgttgcaaatggagcagcctggggactacatatcctctgtggcctggatcaaagagggcaactacctggctgtgggcaccagtaacgctgaagtgcagctctgggatgtgcagcagcagaaacggcttcggaacatggccagtcactcggctcgagtaagctctctaagttggaacagctatattctgtccagtgggtcacgttctggccacattcaccaccatgatgttcgggtagcagaacaccatgtagccacactgagtggccatagccaggaagtatgtgggttgcgctgggccccatatggacggcatctggcaagcggtggcaatgataacgtggtcaatgtgtggcc

SEQ ID NO: 1959 - DNA, 566 bp, Cricetulus griseus
  misc_feature (296)..(296): n is a, c, g, or t
  misc_feature (435)..(435): n is a, c, g, or t
  misc_feature (495)..(495): n is a, c, g, or t
  misc_feature (511)..(511): n is a, c, g, or t
ctgacacagacacaggctgtggagggggagattgaactagccaagatgaagaagttcattgcttactgccgagcgaggtgtggccctcggctgtctgcaaaggcagcagagaaactgaagaaccgctatatcatcatgcggagtggggcccgtcagcacgagagggacagtgatcgccgttccagcatccccatcacagtgcggcagctggaggctattgtgcgcattgctgaggcccttagtaagatgaaactgcaaccctttgccaccgaggctgatgtggaggaggcactcangttattccaggtgtgcacactggatgctgctttgtctggcaatctgtcaggggcggagggcttcactacccatgaggaccaagagatgctgagccgtatcgagaagcaactcaagcgccgctttgccattggctcccangtgtctgaacacagcattgttcatgacttcaccaagcagaagtatccagagcatgccatnccgaaaggtgctgcanctcatgctgcgcaggggagaggtccaacaccgcatgcagcgcaaggtgctctacc

SEQ ID NO: 1960 - DNA, 550 bp, Cricetulus griseus
acagctagcagatgccttggggcccagcatctgcatgctcaaaactcatgtcgatattctgaatgatttcactctggatgtaatggaggagttggcagctctggcgaaacgccatgaggggttaatatttgaagacaggaaattcgctgatataggaaacacagtgaaaaagcagtatgaaggtggcatctttaaaatagcttcctgggcagatctagtaaatgcccatgtggtaccaggctcaagagttgtgaaaggtttgcaggaagtgggcttgcctttacatcgagcatgcctgctcattgcagaaatgagctctgctggttccttggccactggaaactataccaaagcagcagttgggatggctgaggagcactgtggatttgtggttggctttatttccggctcccgagtaagcatgaaacccgagtttcttcatttgaccccaggagttcagttagaaacaggaggggatcaccttggccaacagtacaatagtcctcaagaagtgattggcaagcggggttctgatgtcatcattgtaggc

SEQ ID NO: 1961 - DNA, 476 bp, Cricetulus griseus
  misc_feature (370)..(390): n is a, c, g, or t
gccataaacattttgcaagaacagcctgactctaaaggtcccagcattcctttctcgatttttgatgagtttctttcagacgaaaaggacaaaagtcctgctgcagattctccacaggctctcaaagcccagcgaagaccccttgcagttctcaaaactgcagaaatcattgcctcaaatgaggacatgtctcctgatgtttgtgatgagcttacaggaattgatcctttgggtgaagatgccaccataccaagtttcaggaacgtaaccattggtcctaaccctgaggacacttgttactttgttagagcgcctcggtttgcatctactcctttccatgagataccgtccttgcagggcatcccttccnnnnnnnnnnnnnnnnnnnnngaagaggatctggatgggaagaccactgaggttcatcacactgcgctggccactatttataaccagaccctcagcatcaagaagct

SEQ ID NO: 1962 - DNA, 499 bp, Cricetulus griseus
ccatgggctccgtgcccgagttttactccaagaggaggcactacgatgcacagccctccaactcgctggaccaatatggattacgattgggcatgtggtactggaaagatgaaaccaaaactctggaatttagaagtgggacgcctgcagtagagctcaaggataaaggcaagaaagggaaggcggttcacttcgctgaaatggacggtccggcttctgaaaggttgacagataaaaggtttccctcaagggacgaaaagtcactgaaagtcttggagaaacgatatcagctgggcaatatcacgctggatgatgtcaagtttgttgctttgcttttcctccaagacactgaaatgcagcgggtctgttctttcacaacatttatgagagagaaaatatcagatactcaaaaagactggaaattctttgagtccttttatactttctgtacatgcatcgcttggattgtcttccgacgtcagtacctgacagagatcga

SEQ ID NO: 1963 - DNA, 559 bp, Cricetulus griseus
agtttctggacatggcagtgctgaaggactacatagcatatgcacatagtaccatcacgccccgactgagtgaggaggccagccaggctctcattgaggcctatgtgaacatgaggaagattggtagtagccggggaatggtttctgcttacccccgacagttagagtcattaattcgattagcagaagcccatgctaaagtaagattttcagacaaagttgaagcaattgatgtggaagaggcaaaacgccttcaccgggaggctctaaagcagtctgctactgaccctcgcactggcattgtggatatatctattcttactacagggatgagtgccacttctcgtaaaagaaaagaagaattagcagaagcattgaggaaacttattttatctaaaggtaaaacaccagctttaaagtaccaacaactatttgaggatattcggggacagtctgacacagcaattaccaaagatatgtttgaagaagccctgcgtgcattggcagatgatgacttcttaacggtgactgggaaaactgtacgcttgctctgagccat

SEQ ID NO: 1964 - DNA, 558 bp, Cricetulus griseus
  misc_feature (533)..(533): n is a, c, g, or t
cttttgcttgcatgggacatacctaccaagatgggtctgctcgtgcagaagtgtcccaggcctgcaacttcctcctgtcccagcagcatggcagatggaggctggggggaggactttgagtcttgtgagcagcggcgttatgtgcagagtgccaagtcccaggtccataatacgtgctgggccctgatgggcttgatggctgtcaggcatcccgacatcactgctcaagagagaggaatcagatgtctgttggagaagcagctctccaatggagactggcctcaggagaacatctctggggtcttcaacaagtcctgcgccatcagctacacaagttacaggaacatcttccccatctgggccctgggtcgcttctccaacctgtaccctgacaattccctcgctggccacctttgaatgcacatgcgtcagcctggatcatacagatccaggcaaggctgggggttcttggctagccctgccctatgccttgttctctatttctgtaaacatgaagctggggatagggtcanggttggtgtctttatgcacttggca

SEQ ID NO: 1965 - DNA, 508 bp, Cricetulus griseus
agctcttctgctccatcctgtgtgcctcaagcacttgacttttctccaaacaagagtgaatctcctccttcccatggctccaccacagaggcagctcaaggtgaaacagagcctcatgaagacaacacaagccccactgagggtcttctcctggacatcaagctggaccaactcaccatcactcctgaagcaggaggcagagacctagctgaccgccctctcatagacttcagcaacacccctgagtccaacatggctttgggacccagcagctggcccctgattgaccttgtaatgaatactccagacatgggtagaaatgatgtggggaaacctccaaaagctgagcttgggcagctgattgacctgagttccccactgatccatctgagccctgaggctgacaaagaaaatgtggattcaccacttctcaagttctgagcaaagcacaactctgccctttactctgtttatttctgttgtggctttaagcccattagaagcaaat

SEQ ID NO: 1966 - DNA, 568 bp, Cricetulus griseus
gagtcaccttctggattgctgcccccatgacatccttgctgggacgcgcatggatttaggagaatgtaccaaaatccacgacttggccctccgagcagattatgaaattgcaagtaaagaaagagacctgttttttgaattagatgcaatggatcacttagagtccttcattgcagagtgtgaccggagaactgaacttgccaagaagcggctggcagaaacacaggaggagatcagtgcagaagtttctgcaaaggctgaaaaggtacatgagttgaatgaagaaataggaaaacttcttgctaaagcagagcaactaggagctgaaggaaatgtggatgagtcccagaagatccttatggaagtggaaaaagttcgtgcaaagaaaaaagaagcagaggaagaatatagaaataccatgcctgcatccagttttcaacagcaaaagctccgagtctgcgaggtttgttcagcttaccttggtctccatgacaatgaccgtcgtcttgcagatcacttcgggggcaagttacacttggggttcattcagatccgagagaagcttgat

SEQ ID NO: 1967 - DNA, 418 bp, Cricetulus griseus
aagcagcggctcaaggaggaacgacgcaaggagcgacaggaggctctggaggctaaactggaggaaaaaaggaagaaagaggaagagaagcggttacgggaagaagagaagcgcattaaggcagagaaggcagagatcaccaggttcttccagaagccaaagactccacaggcccccaagaccctggccggctcctgtggtaagtttgccccctttgaaatcaaagaacacatggtgctggctccacggtgccgggctaccttggaccaagacctttgtgatcggctggaccaacttctacagcagcagagtggggccagctccttcctcagtgacctgaaaggccggctgcccctgaggtctggacccacccatgtgtgcagccgcaacaccaacatcatggacagggtcattgtgg

SEQ ID NO: 1968 - DNA, 482 bp, Cricetulus griseus
ggacgccgagatggagttcaactgcgagatgaacaagagaactgggcaacccatgatccacatctatctggataaggagacaggaaagcctaaaggtgatgcaacagtgtcctatgaagatgcacgaactgccaaggctgctgtggaatggtttgatggaaaagattttcaaggaagcaaacttaaagtttctcttgcccgaaagaagcctccaatgaacagcatgcggggtggcatgccacctcgagagggcagagggatgccaccaccacttcgtggaggtcctggtggcccatgtggtcctggaggacccatgggacgcatgggaggccgtggatgagacagaggaggcttccccccacggggaccccgaggctcccgagggaacccctctggaggaggaaatgtccagcaccgatctggagactggcagtgtcccaatccgggctgcggaaaccagatctccgcctggagaacagaat

SEQ ID NO: 1969 - DNA, 385 bp, Cricetulus griseus
accctggaaccaagggtctctcacaccattgctcagtgctgaactataactgccacccatccccacataccaaatagagcagtggcaacctctccctcccccgacctaactcttggaacttagtcctcctcctttcttcccattaagtctgagaggtaagagctaggttatggaaggaagggtttggccagaagtgggaatagccaagtgccccggacctctcatcttccctccgtcctgctttccacctcccttgggtacacacacagccttttgggaacagccggggccaggactgggtcacctatgagctgaatcagcctctcctcctgagtcccagggcccctgcagttcccgagtctgttttgtcctgcagcctcttgcc

SEQ ID NO: 1970 - DNA, 436 bp, Cricetulus griseus
tgttatctgtgcagcctctctctttggagaacttatctctgaggggctgctgtcaagatgcctggttcctttctggcaagcagcaggtagctaaagaaaaccagcaggtagcaaaggatgtcacactacatcaggccttgcttcgtctgccccagtaccagactgatctcttgctcaccttcaatcagcccccgtaaggaaggaaagggtgggaaactcgcgatctcccccgagccccctcgcccccctgacaattaggctgggtaggacaagcaggaagaaggaagattggctggtggattccttcaaggccgaggtcctctagggaataggaactgtaatcctgcaaacctaatgccggtccattgtctttctccctctgttccctcaccctaaactctaacaggaggtctcttggccctgaaaatctatcatg

SEQ ID NO: 1971 - DNA, 344 bp, Cricetulus griseus
gtcactcgtgtctctgaagtcaaacctcggatggtggtggccacatatacttgtgatcagtgtggggcagagacttaccagccgatccagtctcccaccttcatgcctttgataatgtgtcccagccaggagtgccaaaccaaccgctcaggagggcggctttacctgcagactcgtggttccaaatttattaaattccaagaaatgaagattcaagaacatagtgatcaagttcctgtgggaaacatccctcgtagcatcacagtggttttacaaggagagaatacaaggactgccctgcctggtgaccatgtcagtgtcactggtatcttcttgccagtcct

SEQ ID NO: 1972 - DNA, 469 bp, Cricetulus griseus
agccatctttgcattgttcccgggtcctcctcctcctccgcggcggactccggcagctctctcgccagagtcctcgagctccagttctcgcctccctcgctgcagcgcatcaccggcgtgccccaccatgtcagacgcggccgtggacaccagctccgagatcaccaccaaggacttgaaggagaagaaggaagttgtggaggagacagagaatggaagagacgcacctgccaatggaaatgctaaagaggatggagatgaagatgaggaagctgaggctcctacgggcaagcgggtagctgaagatgatgaggatgatgatgttgacaccaagaagcagaagaccgatgaggatgactagacagcagaaaggaaaagctaaacttaaggccaccgtgacctattcaccctccacttcccgtctcagaatttaaacgtggtcaccttcgagtagaggagcaggccccgc

SEQ ID NO: 1973 - DNA, 342 bp, Cricetulus griseus
cacagacatctctagacccaaggacttgtgccccaggaggagccgaggctaatgggtgcccgcctcagccctgaggccaacgctgaggtgccccgtgaggcccgcgaggcccttagtttccacggggatgccactggcacacaggtgcatctggatgaccagaggagcacagcgcataggctatccacgtttcatgatggcattgtgttcagccagcgtccagtgtggcccggtgagcgtgtagcgctgcgcgtgctgcgacaagaagacggctggtgcggtggcctccgcgtgggcttcacgcgcctggaccctgcaaatgtggccgcatcctgcctgccg

SEQ ID NO: 1974 - DNA, 397 bp, Cricetulus griseus
tcaggctctgccacgcttgctgtgtggggagtggaaagacctgagaaagtccttgtgctgggatctgatcagggaaagaatgcccttcaacatgaccttgggacccgggcagccagggggagattttaccacaaaaccaccaggcactaagtaagtgcttagcttagtgcagggtggctctggtcctgatagcacctgatgctctttcccttagaattggggtgacccacgaggcagacagggcacatcaaaccaccattgccttgaacacacctaaagtaaggcccatgtactttgccatatcctccaagtcttctactctaaggacagttaaattatgtgggcctgagaaactgacaagcttactattgggaacctgttcagaaaaccttgccca

SEQ ID NO: 1975 - DNA, 549 bp, Cricetulus griseus
ggacattcagcaccatctgccagtccagcatttggtgctaacccgaccccaacatttggacaaagtcaaggtgccagccaacctaaccctccaagctttggctctatatcatcttcaacatcgttgttttctgctggttcccagcctgcaccaccacctacttttggggcagtgtcaagcagcagccaacctcctgtgtttgggcagcagcctagtcagtctgcatttggctctgggacagctcctaattccagttctgttttccaatttggcagcagcaccacaaatttcaacttcacaaacaataatccgtcaggagtgttcacatttggtgcaaatcccagcacgccagcagcctcagcccaaccctcaggttcagggggctttcaattcagccagtctccagcatcatttacagtggggtcaaatgggaaaaatatgttctcttcttccggaacttcagtttctggtcgcaagataaagactgctgtcagacgcaggaaataaaggtcacgaaggtgttatacccaacagttttatcaacggctg

SEQ ID NO: 1976 - DNA, 574 bp, Cricetulus griseus
ccaagtgacgtgagcgtccactccgagctcacggtccgcaggtttccatcttccgcaatctgctgtgatggctgcctcggtccctgccgccgtttccctctccccactgctgtctattctcctgggcctgctgctcctctctgctccgcctggcggcagcggcctgcacacgaagggcgcccttcccttggacacaatcactttctataaggtcatccccaaaagcaagttcgtcttggtgaagttcgacacccagtatccctatggtgagaagcaggacgagttcaagcggctggctgaaaattcggcctccagcgatgatctcttggtggcagaggtggggatctcagactacggtgacaagctgaacatggagctaagtgaaaaatataagctggacaaagagaactacccagtattctacctcttccgggatggggactttgagaaccctatcccatacagtggggcgattaaggtcggagccatccagcgctggctaaaggggcagggggtctacctgggcatgcctggttgcctgcctgcgtatgatgccctggcaggtgagttcatc

SEQ ID NO: 1977 - DNA, 386 bp, Cricetulus griseus
gcactgcacactgctgctcaagacgctgggtggctactcttggaccctgggtcctgctcaaaccccactggacccaccccagtcctcagacactttgatctctgtggaccctgcagaggatgaagcccagcagactgcagcccaagtcgcaggggtcctgggtggcctgcttacacccctcttcctccgtggcgtgctggcctacctcatttggtggacggctgcctgccatctgctctccagcctctttggcctctatttccaccagcacctggcagcttcctaatgtgatgccactaggtgctggcatctgattcctgtccaccagggctgggactgtcccctgtgtatgtacttcaaaccctagatgacctagggataagggt

SEQ ID NO: 1978 - DNA, 449 bp, Cricetulus griseus
gatatcagctttgacaagactgatgaatcactggagccaagaactgagacagacaattcaggcacacctcacaataatggaggcatgcgcctacatgactttgtctcaaagacggttataaagcctgaatcttgtgttccctgtggaaagcgcatcaaatttggcaagctgtctctcaaatgtcgagactgccgtttggtctctcatccagaatgtcgggatcgatgtccccttccctgcatttctcccctggtgggaactccagttaagattggagagggaatgttggcagattttgtgtcccagacttctccaatgattcctgctattgttgtcagctgtgtgaatgagatagagcagcgaggcctgactgaggcaggcttatacaggatctcaggctgtgaccgaacagtaaaagagctgaaagagagattcctcaaagtgaaaac

SEQ ID NO: 1979 - DNA, 409 bp, Cricetulus griseus
cagatctcagggagtttgaggcctgcctggtctatatagtgagttctaggatagccagggctacacagcaagaagataatgatgacaatgacaacaaaagctccaatctcacagggaggacagggtgagaacttaccatgaaataacatcctttcatttgcatggttgtggttttcttcagaaacttctttcctccggtgcgtgtatctttcccataattttttgttacaaaccttctgaatctaaacacaaaaaaaataaaagtcagcactaagtcaccactgaaatcccccagacatgctaaattttgtacagactttatcagactcaaaatacataaacaaggcagctggagagatggctcggtggttaagagcagtcactgcttttccagaggacctgggttcaa

SEQ ID NO: 1980 - DNA, 463 bp, Cricetulus griseus
cgctacggcggttactgcgagtgttggcctgcgctgttcgagcacttcccggagcagctgtccagacagctttgagacagctcggcagttctgacctagtaccacccggcgcggagcaacctttgaaaacgcgcgcgcctaaacgctgcgacggttacagcgagtgtcagcgggagctgttcctgcatcttccggcctgggtgctcacacagctttgagccagctcgtcacttcacctttttacttgatcaagggtgtgactgtggacctaaagtgattgctacaatggaaggaatcaataatttcaagacaccaaacaaattatctgaaaaaaggaaatctgtattatgttcgactccatgtgtaactatccctgcctctccatttatgcagaagcttggctttgggactggggtcaatgtttacctaatgaaaagatccccacgtgggttgtctcattctc

SEQ ID NO: 1981 - DNA, 503 bp, Cricetulus griseus
acactgaacatggtagtgacttgtgcctgtaatttcaatacttgggaggtgtaggcagatgattgctttgtgttaagtccaacctggtctgcagaataataatctgttgtaaacccataaaactggggaaaagtagggtcttaaaatatataaactaatgttatgttttgtaaatattaattggagggttttgtttggctcaaggcaaaaactaataaaatgctggttgatagtactgccccttactgcagtgccttccttccagctttgactaagaaggctcaggtttcatttcattattgtggttgatttcagagcctgttgttagcaaagtcagcagaatgtagaacggtgattgtcattgggttgacacttggctgggggtagtggcctttgttcattaccgtaactagttcaagctggactggaactcactttgcagaccagttagtctcaaatccacaacaacacttgcttcagcctcccaaatgttttgattaaag

SEQ ID NO: 1982 - DNA, 376 bp, Cricetulus griseus
agggtcctacccagcaccagtgagagaaactctggagccatcatatgctctttaacgtgagatcactgcgttggtactataatgagctctttttaacgctagctttcatttagactggttttgtcgacagccacttaacctcctttagtaccatgaagctggactcttaaatggaggagttctgggtcactctacttcacgcattggtgtaaaaagtcacagcttctacttgcttcatctggacatcagactgctgcgtctaagaaaacagtagtaccagttccccacagctagtgggctggaggctcataatggatggctcattggttaaaagcactgtggctcttccagaggatcagcattcgattccccagca

SEQ ID NO: 1983 - DNA, 485 bp, Cricetulus griseus
tgaactctatgaaaaacgagatctcatcaaaaacctaaagacgatgaaagaagatcttatggaaagtatccaaaatccacaaggggaaatatgcagcacaaatacaggaagacatttcagagctaatgaataaaactatgacagtaaaagattcaatcgctgagaaaacatattttattgaagaagagaaaaagaaacatgaaaaactaagaaaagaaatagaggtacagcataagagatatgatgcaattcttaagcgtttgcattgtcagatgagcaagattcagttaaataggaggaaatggcaatggaacatccaacaactggaaaaaactgcagctgacttaaaaaagcgccttggagtgaaagaagcccatgaactacagaacagaccagcagcattgtgggaaagaataccgtgaagatcctttggtcacttgtgaaccagcacccagcggcaaaggcctgtctcaatggccgatatt

SEQ ID NO: 1984 - DNA, 575 bp, Cricetulus griseus
  misc_feature (71)..(71): n is a, c, g, or t
  misc_feature (489)..(503): n is a, c, g, or t
ggtctcagtttctcatcagctctttcttacatgccttcatgtagggagaactaaggtagagagagacaggngaaaaagtaactggcctgggctctagctgtcccctgccgactaaaggcttcttacgtcccatcccggtatatccatgctggcttctctatggagctgacactcagcaggtgttcatgttagtcctttgtcttccaaacacccatttgccagagtcagtgtcattttaggtggccatttctgttgaagcacttgtatcataagacgttggatttggactagtgacctttagaccatgtccttgtagctacacaccaagggctcccaggagaccaaaatagttaaacattacttgactacaactgagtcctctgggtaatggccactgtttcttgtactgtaactgacatagttgcttagtttgccctttcaccccagcatctggcaacagtgctattagtacaagctgagacactatgnnnnnnnnnnnnnnnaggctccctgaacctgaacctgaacctgggggagccagaagatgtgctcaagtgctggctgcagcccaagcc

SEQ ID NO: 1985 - DNA, 497 bp, Cricetulus griseus
gcggtgttccgtttttccagcataaaaagccacatggaaaggacaaagaaaacagaggcattaacccagtggagaagtctaaagtggaagagacttcagagtactctgtcacaaaaagcagattgccacttcgagcctcaaatgtgtaattaatctgagggctaaggttttcttttcttaaaaagtaaaacctgaaacttcataatttgaacttttatacagatttcaatgggatagactatgtcaagacatcacagtaactagttgaattgagtcctttttaatcatccttatagtttaagcatgtagtaaatttggtttcatttggaatttatattatgtgtgtttctagcttatataaagtagctcttctgtaatgcgttgttttcttgtatattattaaataccaaatatatggaaattgttcttccaagcttggacttaaatggatgaatgtcatctcccttcctgtcttgctaggcctgagttctgtatgt

SEQ ID NO: 1986 - DNA, 535 bp, Cricetulus griseus
caaccctgaggctgccagagctgctaacaatggagccttacccccggacctcagctacattgtgcgagctaggcatggtggtgaggactatgtattctccttgctcactggttactgtgagccccccactggggtgtcattgcgagaaggcctctacttcaacccttactttcctggccaggccattggtatggctcctcccatctacaatgaagtcttggagtatgatgatggtaccccagctaccatgtcacaaatagccaaggatgttgccaccttccttcgatgggcatcagagccagagcatgaccatcggaaacgaatggggctcaagatgttgttgataatgggcttgctgctgcccctgacctatgccatgaagcggcataaatggtcagttctgaagagtcgaaagctggcatatcggccacccaagtgaccctgtccagtgtctgcttgtcctcttgcctgaagaagccctcaacagcccaggaagtcctaggccttttcaggcctgctccttttcatccaatag

SEQ ID NO: 1987 - DNA, 523 bp, Cricetulus griseus
cctcctcactggacccgagtgtggtggcagctcgggctggggcccctggtttccagagggtctgggctgtttcggctgctgtaactagatttagttcagtggtgctctggaggagaccgggagaagggttgaagtgtgaggctgggtggatgggaaaattagttttggtcttcacatctctggtttcatttttgctgtcgtagcgcttgttgctgtctctatgttaaaatgccaaaaatgatctagttgtcgctttcctcctgctccagcactccacagcagcttctggctttgtgaggtgtttgtctcagccagtgccatgacctggcaggaacagatctgggttcccactgtctcccatcatgtgtccgactatagtccgtcgggacaagcttctgcaaaactaacctgctttgtccggtttcccccagacaccacctctcgcttccacttgccgcctgagccttcctggtctctctctggctagtgctgcacagwgtctgcttctgctgtcctggaggtc

SEQ ID NO: 1988 - DNA, 596 bp, Cricetulus griseus
  misc_feature (407)..(407): n is a, c, g, or t
  misc_feature (491)..(505): n is a, c, g, or t
cttcttcgacagaggctactgtgaagttactactccaacactggtgcagacgcaggtggaaggtggggccacactcttcaagcttgactattttggagaagaagcgtttttaacccagtcctcgcagctgtacctggagacctgccttccggccctgggggatgttttctgtattgcccaktcatacagggctgaacagtccagaacacgaaggcacctggctgaattcactcatgtggaagctgagtgtcccttcctgacctttgaggacctcctgaaccgtttagaggacctagtgtgtgatgtggtggacagagtcttgaagtcaccagtggcaagcatagtgtatgacctcaacccgaactttaaaccccctaaacggcctttcaggcggatgaactattcanaagctatcgagtggctgagggagcacgatgtaaagaaagaagacgggacactctatgaatttggagatgatattcccgaagctnnnnnnnnnnnnnnnacagacaccattaatgaaccaatcctgctgtgtcgggttcctgtggagatcaagtccttctatatgcagcgatgtgcctgagatcctcgac

SEQ ID NO: 1989 - DNA, 555 bp, Cricetulus griseus
ctacgagcagatgaatgggcctgtgactgctggctcccgccaggagaatggtgccagcgtgatcctccgtgacattgcaagagccagagagaacatccagaaatccctggccggaagctcaggccctggggcctccagtggacctggtggagatcatagtgagctcattgtaaggattgccagtctggaagtggagaaccagaatcttcgaggcgtggtacatgatctgcagcagtccatttccaagttggaggtcaggctgaacactctggagaagagttcacctactcacagagccacagcccctcagacgcaacatgtgtctcctatgcgtcaagtggagcscccaaccaagaargcggccacaccggcagaggatgatgaggacgatgacattgacctgttcggcagtgatgaggaggaagaagataaggaggcagcccgactacsaraggagaggcttcgtcagtatgcagagaagawagccaagaaaccctcactggtggccaaatcctccatcctcttggatgtcaaaccttgggatgatgagacaaa

SEQ ID NO: 1990 - DNA, 491 bp, Cricetulus griseus
agccatgagcagcaaagtgtcccgcgacaccctgtacgaggcagtgcgggaggtcctgcacggcaaccagcgcaagcgccgyaagtttctggaaacggtggagttgcakatcakcctgaagaactatgrcccccakaaggacaaacgtttctcgggcwccgtcaggctcaagtccacccctcgccccaagytytcggtgtgcgtcctgggggaccagcagcactgcgacgaatccaaggccgtagacatcccccacatggacatcgaggcgctgaagaagctcaacaagaacaagaagctggtcaagaagctggccaagaaatatgatgcctttttggcctccgagtccctgatcaagcagatcccacgtatcctgggcccaggcctaaacaaggcaggcaagttcccttccctgctgacacacaatgaaaacatggtggccaaagttgatgaggtgaagtctactatcaagttccagatgaagaaagtgc

SEQ ID NO: 1991 - DNA, 559 bp, Cricetulus griseus
  misc_feature (247)..(262): n is a, c, g, or t
  misc_feature (426)..(518): n is a, c, g, or t
agccggtgctaagaagtcgctctgagatcgcgccgcttargtttttctgttcctttttttcttcctgtttatctccaagcagccagcggcccatagaaacatgaccaccaatatgggccccttacatccatactggcccaggcacttgaggctggacaactttgtgcctaatgacctccctacctggtatatcctggttggcctgttctccgtctctggggtcctaattgtgaccacttggctgctnnnnnnnnnnnnnnnngttgccccacttggaaaatgtcgtcgactggccctgtgctggtttgctgtgtgtgcattcattcaccttgtgatcgarggttggttctctttctaccatggcatccttcttgaagaccaagctgtcttatcccaactctggaaagagtattccaagggagacannnnnnnnnnnnnnnnnnnnnnnnnnnnnnnnnnnnnnnnnnnnnnnnnnnnnnnnnnnnnnnnnnnnnnnnnnnnnnnnnnnnnnnnnnnnnttctccaccagaaatccttccgctttatcctacagctcgtg

SEQ ID NO: 1992 - DNA, 550 bp, Cricetulus griseus
tactgccaatccaaaggcatcgtggtgaccgcgtacagtccccttggctctcctgacaggccctgggccaagcctgaagacccttctctcttggaggatcccakgattaaggcratkgcrtccaagtacaataaaacaacagctcargtgctgatccggttccccatacaaaggaacttggtggtgatccccaagtccgtgacaccagcaagaattgctgagaacctgaaggtctttgacttcgagctgagcaaggaggatgtgaccactctactcagctacaacaggaactggagggtgtgtgccttgatgagctgtgctaaacacaaggattaccccttccacgcakaagyctgaagcttcggatgcctgctctctcccacgagacttgcacctgctcttcctgtwtcatctgtccttgtgggtgtastgtagactgtgtccctctrcactgtsyggaacctggaagatcagacawcgagggtctgttagtttgatgtagtctccacagagcattatcagtagctgagtgattttcttcagcctttct

SEQ ID NO: 1993 - DNA, 592 bp, Cricetulus griseus
acagcataatagagcacatgcctcctgagtcagttgaccaatacaggaagcagatcttcattctactgttccaaagactgcagaactccaagaccaccaagtttatcaagagtttcttagtgtttattaatttatattgcattaagtatggggcattagcattacaagaaatatttgatggcatacaaccaaagatgtttggaatggttttggaaaaaatcattattccagagattcaaaaggtatctggaaatgtggagaaaaaaatttgtgcagttggcataaccaaattactcaccgaatgtccaccaatgatggacacagagtacaccaagctatggactcctttgttacaatctctcatcggcctttttgagttgccggaggacgacaccattcctgatgaagagcattttattgacatagaagatacaccagggtaccagactgccttctcacagctagcatttgctggcaaaaaggaacatgatcctgtagggcagatggtgaataacccgaaaatccatctggcacagtcacttcacaaactgtctactgcctgtccggggagggttccctcaatggtgagcac

SEQ ID NO: 1994 - DNA, 579 bp, Cricetulus griseus
gactcgccgccatgggccgtgtgatccgagggcagaggaaaggcgccggatctgtgttccgcgctcacgtgaaacaccgtaagggcgccgcgcgcctgcgtgctgtggacttcgctgagcggcacggctacattaagggtatcgtaaaggatatcattcatgaccccggccgcggcgcccccctcgcgaaagtggtctttcgggatccctaccgatttaagaagcgcacggagctgttcatcgccgcagagggaatccacacagggcagtttgtgtactgcggcaagaaggcccagctaaatatcggcaatgttttgcccgtgggcaccatgcctgagggtactatcgtgtgctgtctggaggagaagcctggagacaggggcaagctggcccgagcatccgggaactatgccacagtcatctcccacaacccggagaccaagaagactcgagtgaagctgccttcggggtccaagaaggttatttcctccgccaacagakctgttgttggtgttgtggccggtgggggtagaattgacaaacctatcttaaaggctggtcgtgcctaccacaagtaca

SEQ ID NO: 1995 - DNA, 543 bp, Cricetulus griseus
tgaaaaagccgagaagcctgacacaaaagagaaaaagccagcagccaagaaggctggtggtgatgccgatggtgcagccaaaaagggtgaccctaaggttaaaaaacccaagaaggggaagccccattgcagccggaaccctgtcctggtgagaggaattggcaggtactcccgatctgctatgtattccagaaaggccctatacaagaraaaatactcagctgcaaaaaccaaggktgaaaagaagaagaaaaaggraaaggkccttgctactgtcactaaaccagttggcggtgacaagaatggtggtactcgggtggktaarcttcgaaaaatgcccaggtattaccctactgaagatgttcctcggaagctgctgagccatggcaagaagcccttcaktcakcatgtaaggaagctgcgtgccagcatcactccagggactgtcctgatcatcctcaccgggcgccacaggggcaagagggtggtcttcctgaagcarctgggcagcggcttgctacttgtgacaggacctcttgccct

SEQ ID NO: 1996 - DNA, 507 bp, Cricetulus griseus
cctaaggagacttgcctcatcaccttcctgctggcaggcattgagtgtcccaraggagcackaaacctaccaggcttggtgcaggaaggagagccattcagtgaggaakccacacttttcaccaaggaactagtgctgcagcgagaggtggaggtagakgtykagagcatggacaasgctggcaacttcwtckgctggctgcacatggatggggctaacctgtccgtcttgctggtggagcaagcgctttctaaggtccacttcactgccgagcgcagcgcctactaatagcccctcctatctgctgaggaagccgccaagcagaggaaggagaaggtctgggcccactatgaggagcatcctgtagaggaggcgttgcctgtgctggaggagaaggagcgttctgccagctacaagcccgtgtttgtgactgagatcacagacgacctgcacttctatgtgcaagacgtggagactggcacccagctggaaaagctgatggagaac

SEQ ID NO: 1997 - DNA, 332 bp, Cricetulus griseus
tgtgtggtctcgtcgccagcacagccgggcctacaggcaagcaaccatgtctaarggacctgcagttggtattgatcttggcaccacctactcctgtgtgggtgtcttccagcatggaaaggtggagataattgccaatgaccagggtaaccgaaccacgccaagctatgttgcttttactgacacagaacgattaattgggtggagaagactttgataacagaatggtcaaccatttcattgctgagtttaagcgaaagcacaagaaggacatcagcgagaacaagatagctgtcaagcgtctgcgtactgcctgtgaacgggcaaagcgc

SEQ ID NO: 1998 - DNA, 1234 bp, Cricetulus griseus
  misc_feature (78)..(85): n is a, c, g, or t
gaacagcatactttggccaaatacctcatggagctcactwtgttggactatgacatggtssactttgctccttctcannnnnnnnctggagctttttgcttagcactgaaaatycttgacaayggtgaatggacaccraccctgcagcactacctgtcctayactgaagaatcccttctgcctgtcatgcagcacctggctaagaatgtagtcatggtgaaccrtggccttacaaagcacatgactatcaagaayaagtatgcaacatccaagcatgctaagatcagcactctggcacagctgaattgtacactagttcagaatttgtccaaggctgtgkcaaaggcrtaactcaagtggaccacwacactacatcgscaaatgyrattggcaccatgtgccrcctgtacatagtatmcagtgtttacttgctcttcaataaaggytgttttacttttcatagcttacctcatwtgrwwsyyggwtsytctgactctaggataacaagggttgtctaaaacatttaggattatttttgaaactgcttttagtttaacagagaatccaagtaatgtacgtaattgtagcctatatgtttatgtacttccttctttaatgtgtcctggtcatatcttttaagtcatcctgcaaagccctctgcctagctcttgtttaaactgtcaatttaccagcttgtccttagttcccttttctatttcttcaggtggttgctgtccttcactgtgtcttgagctatggactttcagatctgaaccccagttttcttgtgaattatttatttgttaattggcttgggaaatagcatgttttaaaattaaaggtataaaaagaatttgccccttaatctcaatgtcctatataaatgtaatcatgcatatgttgtcaaggagatatggactcatttttttcaacaatattccttttaatgcctatattgcatttcctaagtgtacatttcatactgtatgtaatgtattcagtgatcctttacaatacattcaaattgcattctctcattgcctctaaacaatactgctaaaatgttgttttatgccttgcttggctgtatgcatagtagctttcccagggggtatatgctttaaattctgatgaagccagatgagacttttggttgtgggcactataccaaggtgccatttcctctatctttccactgtcttatgacacttaactggcaaaaatcctgtctctg

SEQ ID NO: 1999 - DNA, 155 bp, Cricetulus griseus
tctttctgcccctggatcatgtcaaactcctagaacttcagcttcaacattagctgataggcattgattcctctaattgtgtcatcttcattctgtgatcatgtatttgtctgtggccctgtatggtctttccatgatgtctcaaagtaaaaagc

SEQ ID NO: 2000 - DNA, 594 bp, Cricetulus griseus
  misc_feature (29)..(46): n is a, c, g, or t
  misc_feature (482)..(482): n is a, c, g, or t
cgaactcaagcatgcgtcacatatcagcnnnnnnnnnnnnnnnnnncacagtgtcaaaggcttgggcaaaacgacccctgacccttcggccagcatcaccctggagggtgtasaggttccactggggacagggatcccatcgggtgttaatgacacctgcctactatataacgagtacatcgtctatgacattgctcargtgaacctgaaatacctgctgaaactgaagtttaattttaagacatccctgtggtgaagtgygaggggtgtgctgcacccakcacccaagcctakgggtaaacttccccctggtgcctccacaccacagacaccacaaaacctcagccacaccgctgcctaatggtggcaccctcacccgatctccttagggttctatatagacaggttaaagggctctgggttcaagtcccttgtccgtgttgcactcggtgggagggttgttaggggttttatcctaccangcatagccctgatagacacggctgacagtagarggaaagttggggagargtttttgttttgtttgcctagactagtcttgagggggaaaagccacgtcacagccacaatgtc

SEQ ID NO: 2001 - DNA, 1275 bp, Cricetulus griseus
  misc_feature (593)..(647): n is a, c, g, or t
ccgacggtgtccagtgatttgaagamtattgacacaggagttaatcctaaagctaagagccatgtgacyatycggcgggcagttttagaagaaattggaaataaagttagaascmgagcagcyccagtggctaagaaacctcagaacaccaaaataccagttcagcccaccaaagtgacamatgtcaacaaacagccraaacctacagcctctgtgaaacckgtacaratggagacmctggctccmaaggatccttctcctgcccctgaggatgtctccatgaaggaagagaacctctgccaagctttctctgatgctttgctctgcaagatygaggatatagataacgaagactgggagaaccctcagctctgcagygactacgtgaaggacatctaccagtatctcaggcagcttgaggttttgcagtcyatcaacccacayttcttagatggaagagatataaatggacgtatgcgtgccatcctggtggactggctggtccaagtycattccaarkttaggcttytgcargaaactctttacatgtgcattgccatcatggaccggttcctacaggcgcagccggtctnnnnnnnnnnnnnnnnnnnnnnnnnnnnnnnnnnnnnnnnnnnnnnnnnnnnnnncgaggagatgttttctccaaatatcgaagactttgtttatatcacagacaatgcttacaccagttcccaaatccgagaaatggagactctgattttgaaagagctaaaatttgagttgggtcggcctttgccgctccacttcttaaggcgagcctcaaaggctggggaggtggacgtggaacaacacacgctagccaagtatctgatggagctaacgctcatcgactatgacatggtgcactatcacccttctcaggtcgcagcggctgcttcctgcctttctcagaaggtgctgggccagggcaaatggaatttaaagcagcagtattacaccggatacatggagactgaagtactggaagtcatgcagcacatggccaagaacgtggtgaaagtcaacgaaaacctcaccaagttcatcgctgtcaagaacaagtatgccagcagcagactcctgaagatcagcacgatcccacagctgaactccaaaaccatcaaagaccttgcctcccctctgatgggcaggctctaggtggctggctcccgccatgcacatctgattttgtacatactcctgtagtttacttcacaaaacctcttctcagactaatctcctaattgtgtattg

SEQ ID NO: 2002 - DNA, 588 bp, Cricetulus griseus
agctgggccgtctggttaaggacatgaagatcaagtccctggaggagatctacctgttctccctgcccattaaggaatccgagattattgatttcttcctgggcgcatccctaaaggatgaggttctaaagatcatgccagtgcagaagcagactcgggctggccagcggaccaggttcaaggcttttgtcgctattggggactacaacggtcatgttggtcttggtgttaagtgctccaaggaggtagccactgccatccgaggggccatcatcctggccaagctttccattgtccctgtgcgaagaggctactgggggaacaagattggcaagccccacactgttccatgtaaagtgacaggccgctgtggctctgtgttggtgcgtctcatccctgcccccagaggcactggcatcgtctctgctcctgtgcctaagaagctactgatgatggctggtattgatgactgctacacgtcagccakgggctgcactgccaccctgggcaactttgccaaggccacctttgatgccatctccaagacctacagctacctaacccccgacctctggaaagagactgtgt

SEQ ID NO: 2003 - DNA, 1374 bp, Cricetulus griseus
  misc_feature (1097)..(1125): n is a, c, g, or t
attcgcaaggagtgtgaacactgcgactgcctgcagggcttccagctcacccactcgttgggcggckgcacaggatcakgcatgggcaccctgctcatcagcaagatccgggaggagtacccggaccgcatcatgaacaccttcagcgtcrtgccgtcgcccawrgtctyakacaccgtggyggaaccttacaatgccacattgtcggtacaccagctggtagagaacactgacgagacctactgcatcgacaacgaggccctctacgacatctgcttccgcactctcaagctgaccacacccacgtacggggacctcaaccatctggtgtctgccaccatgagcggtgtcaccacatccctgcgttttcccggccagctcaacgctgacctgcgcaagttggctgtgaacatggtgcccttcccacgcctgcacttcttcatgcccggcttcgccccactcacagcccggggcagtcagcagtaccgtgccctgacagtgcccgagctcacacagcagatgttcgatgccaagaacatgatggctgcctgcgacccacgccacggccgctacctgaccgttgccaccgtctttaggggccccatgtccatgaaggaggtggacgagcagatgctggccatccagaacaagaatagcagctactttgtggagtggatccccaacaacgttaaagtggccgtgtgtgacatcccaccccggggcctgaagatggcttccaccttcattggcaatagcactgccatccaggagctattcaagcgcatctccgagcagttctcggccatgtttcgccgcaacgcttttctgcactggttcaccggcgagggcatggacgagatggagttcaccgaggctgagagtaacatgaacgacttggtgtctgagtaccagcagtatcaggacgccacggtcaacgacggggaagaagcttttgaagatgaggatgaagaagagatcaatgaatagggggcctttaagatgctatggtgcacacctgctcttagccctgatggtgtgagcacggtgccctggtctacacatcacaggcccctctcaaccaaatacacaccactgtnnnnnnnnnnnnnnnnnnnnnnnnnnnnnctttcctttaccagacaattgacagtcctaccagaccagggtgatttcatacaggaacactgaaagcaaagttagggggctgtaaaaggctgaagacagagaccaccttccgttaagtgcccagccatcagagttagcagggaagttagaataaagatttgtgtttcatccttggtgataaaatctaaagcaccgcattgttgccttaattgaatatacaatatggaactttgtgacaatccattcata

SEQ ID NO: 2004 - DNA, 572 bp, Cricetulus griseus
  misc_feature (194)..(209): n is a, c, g, or t
aacatgccagcttcccattgatcgtggtggaggtgaaggaaaggccatgtacattgacaccgagggtacgtttaggccagaacggctgctagcagtggctgagaggtatggtctgtctggcagcgatgtcctagataatgtagcatatgctcgagggttcaacacagaccaccaaacccagctcctttatcaannnnnnnnnnnnnnnntagaatccagatatgcactgcttattgtagacagtgctactgccctctacagaacagactactcaggtcgaggagagctttcagccaggcaaatgcatttgkmcwsakktctgaggawgctkctsmgmcwkgcwratgmrtttggwgtwkcwgwggwwrtcaccaaccaggtagtagcccaagtggatggagcagccatgttcactgcagatcccaaaaaacccattggaggaaacatcattgcccatgcatcaacaaccaggctgtacctgaggaaaggaagaggggagaccagaatctgcaaagtctatgactctccctgtctccctgaagctgaagccatgtttgccattaatgcagatg

SEQ ID NO: 2005 - DNA, 1189 bp, Cricetulus griseus
  misc_feature (502)..(516): n is a, c, g, or t
tgaccctgaaagtgatgaaaaggacagtgtgccagcttctccaggccctcctgctgctgacttgccagctgacactgaacagttaaagccatcttccaaacagactgtggcagtgaagaagacagccaccaaaagccagtcttcaacatccactgctggtaccaaaaagagagctgtaccaaaaggaagcaaatcrgattcagccttgaatgctcatggccctgaaaagcctgtgcctgccaaagccaagaacagccgcaaaaggaagcagtcctcttctgatgattctgactctgattttgagaaagtagtctccaaagttgctgcaagcaagaaatccaagggagagaatcaggatttccgagtggacttagatgaaactatggttcctcgagcaaaatctggacgagcaaagaagcctatcaaatacctggaggagtcagatgatgatgatcttttctgatggggagagtattgttttagcaatggttttactgagccnnnnnnnnnnnnnnnttatttgaagttcttctctaaccccctctgaatttagtttggggaagactttttataagactatcctacgtggccatcagctttatattctatatactgtctcagtgatgaccatctcatgacactgttttcttctctgatttatctatgttttgtgtctatttctttggtctctaaaatcttgcttgagattcttttggattccacataattatatgctcacttcagcatgacagaatttattgatcatatgttaagctaaaatgggtatgttttcaaaagtgtgcctctacctcctttcctatgtctactaagatatgaatgaggtagcaaggtgtttctttttcagttgtgtaggtagaattccatcacatagaactagacagttctagtatggatacagtgttcaacctatgatttgatgcatttttgtttcagccataaaaaattactcataactcttttaaacatcatcagagkctgaagaaagtcatcttgactgtgtctccatgatctcagtacatgtagcaagaaaaagagagttagtctggttatgtggcatcctgactttccttatgatacctttcgaacatgagatcacagggaggagacagaagtgctcagacttacatctgcatgctcaattgtgaaatgtggtccattgcaagtgtac

SEQ ID NO: 2006 - DNA, 248 bp, Cricetulus griseus
  misc_feature (43)..(97): n is a, c, g, or t
gtggacccggaacctctcagggtcgcaaacggaggcagacgannnnnnnnnnnnnnnnnnnnnnnnnnnnnnnnnnnnnnnnnnnnnnnnnnnnnnncctaatgtgcccacaggaggcctcaccctcttctgcagtgggccaggaggccccctccccaccttctgccttagcccttccttcactctgtgtgtcttaattattatttgtgttttaatttaagcgtatcctgtatatactctgcctgccc

SEQ ID NO: 2007 - DNA, 1219 bp, Cricetulus griseus
  misc_feature (396)..(411): n is a, c, g, or t
  misc_feature (543)..(560): n is a, c, g, or t
tgcaaggcatggtgacagaaacatcgatgaaatggcagaaggaatgtgaacggtcggtggcagccacccagctggagatgcagaataaactgtgggtcaaagatgaaaagctcaaacagttgagggccattgtgactgaaccaaaacctgagaagccagagagaccctcccgagaaagggaccaggaaaaaatcattcagagatcggtctctccttcgcctgtgcctctttctagtaacaatattgctcagatttccaacggccagcaactcatgagccaaccacagctacacaggcgctctaactcttgcagcagcatttctgtagcttcctgtatttcggaatgggagcagaaactatctccgttcagcacacctgtcaatgtcacctctcttnnnnnnnnnnnnnnnnaggagccaggacaaagtaaaacatgtatcgtgtcagacagaaggcgagggatgtactggactgaaggcagggagatggtccctacattcagcagtgagataggcgtagaagaggaccattgccacaggaacnnnnnnnnnnnnnnnnnncacagaaggtcccgctctgcagggagcagatgggtagatcataagcctgcctctaatgtgcaaactgagacagtcatgcagccacatgtccctcatgccatcacagtatctgttgcaaatgaaaaggcgctagctaagtgtgagaagtacatgctgacccaccaggaactagcctccgatggggagattcagactaaagtaattaagggtgatgtttataagaccagaggtggtggacaatctgttcagtttactgatattgagactttaaaacaagaatcgccgactggtagtcgaaaacgaagatcatccacagtagcacctgcccaaccagatggtacagagtctgaatggaccgatgtagaaacaaggtgttcagttgctgttgagatgagagcaggatctcaactgggacccggatatgagcatcatgcacaacctaagcgaaagaagccttgacctgatagccctggtggccgaagaatgtttttgtttgtgttggtgatttctccaaagctgtgccagacgcagtatctgaatcatcctacagaagaatgtatctggatcacattgtattttttattgtgacttttccaactgttctgaatattttctaaggttttataaaaaaaaaaaatgctgctattgattagccgcaa

SEQ ID NO: 2008 - DNA, 222 bp, Cricetulus griseus
cgactcagcggctgccatggcatcagatgaaggcaagcttttcgtgggagggctgagcttcgacaccaatgagcaggcgctggagcaggtcttctccaagtacgggcagatctctgaagtggtggtggtaaaggacagagagacccagcgatccagaggctttgggtttgttacctttgagaacatcgatgatgctaaagacgccatgatggctatgaatgg

SEQ ID NO: 2009 - DNA, 198 bp, Cricetulus griseus
ctcgtcgagctctgcacttcgtcttcaaagtggggaaccgcttccagacggtgcatttctttctagatgtcctggggatgcaggttctacgccatgaggaatttgaagaaggctgggggggctgcatgtaatgggccttatgatgggaaatggagtaaaacaatggtgggatttgcgcctgaggatgatcattttgtt

SEQ ID NO: 2010 - DNA, 535 bp, Cricetulus griseus
  misc_feature (179)..(207): n is a, c, g, or t
ccatcacctacgaggggaagatgcacttcgtccccgggctggctcggccgatcttcccgccgtgggatcgcggctggaaggatccacggtaccaccgcacggccccgatccccgagcagcctctgtacaaggagcagccctgctacatattccaccggcgctgccgactccttgagggnnnnnnnnnnnnnnnnnnnnnnnnnnnnnccaagttaatagaaggccttcccaagaaagtgcttagtcttgttgatgatccaaggaatcacatagagaaccaagaagaacgtgttctaaacatcatctctcatgcccgtctctggcactctcctgaggacatccccaagagagagacctactgcccagtcattgtgaacagcctcatacagctgtgtaagtcccagattttcaagcacccttctctggcaaggcggatgtctgcccaaaactactccttagccaccacctggaatcgagagtctcttctccttcaagtccgaagtagtaatggtaccatactgagtaccaaggaccc

SEQ ID NO: 2011 - DNA, 498 bp, Cricetulus griseus
agccgctgggcatagaggtcgaccagttcctggaagacgtgcggctgcaggagcgcgccaccggtggcttgttggccgaggcccccaatgaaaagctcttcttcgtggacactggatccaagaaaaaagaaccaaacaagaggacctgggtccagaagaagtctcagcgtctccagaaaccccttcgggttgaccttgcccttgagaatccttctaaggtccctgctcccaaagacatcctcgcacaccaggtccccaatgccaagaagctcaggcgaaaggagcagctatgggagaaactggcgaagcagggtgagctgcccagggaggtgcgcaaggcacaggcccggctcctcagccctcctgcaccaaaggccaaacgcgggctacaggacatcattgagcggcccttctatgacctctggaacccaaacaaccctctggacaagccgttggccggtcaggatgcattttttctggagcataccaagaagaaag

SEQ ID NO: 2012 - DNA, 475 bp, Cricetulus griseus
ccctggtcatcctggagatggagagtggcgcctcggccaaggccctgaatgaagctttgaagctgttcaagactcattctcctcagacgtctgcaatgctcttcacagtggacaacgaggctggcaagatcacatgcttgtgtcaggttccccagaatgcagccaaccgaggcctaaaagccagcgaatgggtgcagcaggtttcaggcctgatggatggtaaaggaggtggcaaggatgtgtctgcccaggccacaggcaagaacgtgggctgcctccaggaagccttgcagctggctacctcctttgcccagctccgcctgggagatgtgaagaactgacaggagagaagccctcactgggaagcgtttccccatcaaacaaatgcgtcagaatgcaggagtgcacccatgagctcccctgccatgaagacatttgagtcttgggacctttcagtcggcctatccgtcctaat

SEQ ID NO: 2013 - DNA, 502 bp, Cricetulus griseus
cctttccagcaaaggctgtaagccgtgagactctagaaaagatgcgccaaaatcaaaaagaaagagaaaataacaaccaaaatccctggacctttgagcgcatagccacggccaacatgcttggcatacggaaattcctgagcccatatgacttgacacagaaagggcagtattggggcaaattcttcctgcctaagcgtgtgtagtcaaagcccaggaacccacgtgcacacagacccttgagactgagtctgcatcttcactgtctttaggatctttggtggttcttggaccatagctaagcacatgagtaaatgacttctgaaaagttatgtcatctgattgttcctaattaaactctgagtgtaacctcaaggtacaacttctcattggtcagtttcagttgctcaaaagattaagaatgatttggcatagccagctgtggtggagcatgtcattaatcccagcactcaggagtcaaaggcaggcagatctcaattaa

SEQ ID NO: 2014 - DNA, 146 bp, Cricetulus griseus
tgtgccgccgcgagagacctggacacgccagatggacttcatcatgtcttgcgtgggcttcgccgtgggtctgggtaacgtgtggcgcttcccctacctgtgctacaagaacggcggaggtgtgttccttattccctatgtcctga

SEQ ID NO: 2015 - DNA, 595 bp, Cricetulus griseus
ccaaaacgtcctatggctggattgagattgttggatgtgcggatcgttcctgctacgacctgtcctgtcatgctcgagtcaccaaagtcccactagtagctgagaaacctctgaaagaacccaaaatagttaatgttgtacagtttgagcccaataagggagcagtgggcaaagcgtacaagaaggatgcaaagctggtgatggagtacctcagctcctgtgacgaatgctacatcacagagatggaacagctgctgaacgagaaaggggaattcactattgaaaccgaagggaagacatttcagttaacgaaagacatggtcagtgtgaagagattccagaaaacactacacgtggaagaagttgttccgagtgtaattgagccctcctttggcctgggcaggatcatgtataccatattggagcacacattccatgtccgagagggagatgagcagagaacgttcttcagtttcccagctgtggttgctccattcaaatgttctgtccttccactgagccaaaaccaagagttcatgccatttgtcaaggaattatctgaagctctgaccaggaatggcgtgtctcataaagt

SEQ ID NO: 2016 - DNA, 535 bp, Cricetulus griseus
  misc_feature (187)..(244): n is a, c, g, or t
tggaggttggctcgacccggcaatttgaggagctactgcgcctcaaagccaagtcgctcctcgtggttcatttctgggcaccatgggctccgsagtgtgtacagatgaacgatgtcatggcagagttagctaaagaacaccctcatgtttcattcgtgaagctggaagccgaagccgttcctgaagnnnnnnnnnnnnnnnnnnnnnnnnnnnnnnnnnnnnnnnnnnnnnnnnnnnnnnnnnngagagtcgaccggttagatggtgcacatgccccagagttgaccaaaaaagtccagcgacacgtgtctagwggatcctttcctcctaktgctactgagcatattawagaagatctcaacgttcgcctgaaaaagttgactcacgctgccccctgcatgctgtttatgaagggaacaccycaagaaccacgctgtggtttcagcaagcagatggtggaaatccttyacaaacacaatattcagttcagcagttttgatatcttctcagatgaggaagttcgacaggggctcaa

SEQ ID NO: 2017 - DNA, 413 bp, Cricetulus griseus
  misc_feature (110)..(110): n is a, c, g, or t
gagtacgtgttctcggacttcttgctaaaggagcccaccgagcccaaattcaaggggctgcggctggagctagcggtggacaagatggtcacatgcatcgcctttggtcnttctctgctgctcatctcgctggccttcgctcaggagatctccatcggtacacagataagctgcttctccccaagttctttctcctggcgacaggctgcctttgtggattcatactgctgggctgctgtgcagcagaagagctccctgcaaaacgagtctggaaacctcccactgtggctgcacaagttcttcccctacatcctgctgctgtttgccatactcctgtacctgcccacgctgttctggcgcttcgcagcagctccgcatctctgctcagacctgaagtttatcatggaggaact

SEQ ID NO: 2018 - DNA, 466 bp, Cricetulus griseus
  misc_feature (171)..(191): n is a, c, g, or t
  misc_feature (222)..(244): n is a, c, g, or t
gaagatacctttgtcccatatgctgctgtcattcatgtattttagttaaatgggcagacaggttctggtggaatggcatatttttaataaatactaatgatctttctagttttctttgctctttcagtgtccacatttttttgtttggtttgttttgttttttcaagacannnnnnnnnnnnnnnnnnnnngtgtcctggaattcactctgtagaccagatnnnnnnnnnnnnnnnnnnnnnnntcctgcctttggcttgattacagtcagtcaactttcagaactggaagttgtcttcctggctggtagactactctgcttaaagaagcttttgtagttttccatgaataagaaaaataggttgaatcaactcaaggttgtagcacatgatcagttggccacaaaatggttttgatgaggcattaaacgtattataaacagccttgctattcctttgaaatgtac

SEQ ID NO: 2019 - DNA, 526 bp, Cricetulus griseus
  misc_feature (307)..(307): n is a, c, g, or t
  misc_feature (381)..(402): n is a, c, g, or t
  misc_feature (477)..(477): n is a, c, g, or t
ctcgctgtggggatgtctcacaatgtagatgggcgcaaattcagatacccacagctggacagcacacagagaatgagcgactttggagcactcgttcctaaatggaatgtattcatcaaacctctcccctcagggttcatggagctatgcggaagaagagcagaaagattgtaagtgccagagggaatggatgacatcacggaaactgtgtcttccagacacaagaggactgacgcacatatgaactcatggagactgtggcagtgtgcacagggcctgcacagcctcaagacagatgggatcccanaatgagagggggaggtggatgcaatctcccatccctaatcaagaagctgtctccaattgacaactactcgcaannnnnnnnnnnnnnnnnnnnnnatagtttcactgggtatttaagccacacttaagggcagaccccatgcccagaagtggatggccaacatagaacanactcaacaatatttttatagatttttttggttcatattgctttgagcac

SEQ ID NO: 2020 - DNA, 539 bp, Cricetulus griseus
gcctctcggaagcaccggtgaccaacctcttccgagcacgcttcttggcctcccgcacagctttcatcccgcgcctttctcagcgtcgcccctcggagtcgccgccgttcctgctgccatccggagcacagtctcacactccaccagcttgccgccatgcccaagaataaaggaaaaggaggtaaaaacagacgtagaggaaagaatgagaatgaatctgaaaagcgagagctggtgttcaaagaggatgggcaagaatatgctcaggtaatcaaaatgttggggaatggacgattggaagcaatgtgtttcgatggtgtaaagagactgtgccatatcagagggaaattgaggaaaaaggtttggataaatacatcagacatcatattggtggggctccgagattaccaggataacaaagcagatgtcattttaaagtacaacgcagatgaagccagaagtctcaaggcatatggcgagcttccagagcatgctaaaatcaatgaaacagatacctttggtcctggagatgatgatga

SEQ ID NO: 2021 - DNA, 487 bp, Cricetulus griseus
tagccccggggcagctgtcaccggtgtgctactggaaggccccttcagcgagcttctaggagcttgagacggtcacggtgccctccaactctcagctggaaggaaagatggttgaagcagatcgcccagggaagctcttcattggcgggctcaatacggaaacaaatgagaaagccctggaagcagtatttggcaagtatggacgaatagtggaaatacttttgatgaaagaccgtgaaaccaacaaatcaagaggatttgcttttgtcaccttcgaaagcccagcagatgctaaagatgcagccagagatatgaatgggaagtccttggatgggaaagccatcaaggtggagcaagctaccaaaccatcatttgagagtggcaggcgtggaccacctccacctccaagaagcagaggccctcccagaggtcttcgaggaggaagtggaggaactaggggacccccttcacgtggaggatacatgga

SEQ ID NO: 2022 - DNA, 103 bp, Cricetulus griseus
gtgaaagacccgagctaacatgtggttagcttgttaaattacaataaagcctcatgcagttttcagcaagctctcaaatccgcctggtgattggggtgacctt

SEQ ID NO: 2023 - DNA, 508 bp, Cricetulus griseus
  misc_feature (274)..(290): n is a, c, g, or t
gtcagcctccgatgccatcatgcagcctgattaggagcaaaggaaagggggaaaggagaagcaactaatcgtcttttcccgatcgtcaggaccctaaagaatggccgagccttgggggaacgagttggcgtccgcagctgccaggggggacctagagcaacttactagtttgttgcaaaataatgtaaacgtcaacgctcaaaatggatttgggagaactgcgctgcaggttatgaaacttggaaatccagagattgccaggagacttctactnnnnnnnnnnnnnnnnnatttgaaagaccgaactggtttcgctgtcattcatgatgcagccagagcaggtttcctggacacggtacargctttgctggaktttcaagctgatgttaacatcgaagataatgaagggaacctgcccttgcacttggctgccaaagaargccacctccctgtggwggagttccttgtgaagcacacaaccagcaatgttggggcatcggaatcataa

SEQ ID NO: 2024 - DNA, 189 bp, Cricetulus griseus
atttctcatgttcattctagtttatattttcatttaaatctttaggttaagtttaagctttttaaaagttagttttgagaattgagacacaatactaatactgtaggaattggtgaggccttgacttaaagctttctttgtactgtgatttccttttgggtgtattttgctaagtgaaacttgttaaat

SEQ ID NO: 2025 - DNA, 228 bp, Cricetulus griseus
  misc_feature (172)..(192): n is a, c, g, or t
tagcttatgctctgatttgaaatcagctgtctttctttttcagattagtgatgatgaaccaggctatgacctagatttattttgtattcctaatcactatgtcgaggatttggaaaaggtgtttattcctcatggagtgattatggacaggtaagtaagatcttaattgaannnnnnnnnnnnnnnnnnnnncggttaagagcactgactgctcttccagaggttctg

SEQ ID NO: 2026 - DNA, 408 bp, Cricetulus griseus
  misc_feature (376)..(376): n is a, c, g, or t
tgctcagcattacgtaagaatggttttgtggtgctcaaaggccggccatgtaagatcgtcgagatgtctacttcgaagactggcaagcatggccatgccaaggtccacctggttggtgttgacatttttactgggaagaaatatgaagatatctgcccgtcaactcataatatggatgtccccaacatcaaaaggaatgacttccagctgattggcatccaggatgggtacctatccctgctccaggacagtggggaggtacgagaggaccttcgtctgcctgagggagaccttggcaaggagattgagcagaagtatgactgtggagaagagatcctgatcacggtgctgtctgccatgacagaggaggcagctngtgcaatcaaggccctggcaaaataactggct

SEQ ID NO: 2027 - DNA, 187 bp, Cricetulus griseus
caacctatagccttagctgtacgtttaacagctaatatcaccgcaggacatctgctaatgcacttaattggaggagctacactagtcctaacctcaatcagcctaccaactgctataatcacmwttattatcttaattatattaactatcctagagttcgctgtagccttaattcaagcctatgtat

SEQ ID NO: 2028 - DNA, 208 bp, Cricetulus griseus
tggacatacggctggccaccggttaatcttattagctggatacaccctagccaagggatgtcaaaacacctgaaggatgaggccagcctagtatcaattaaacttatgacaagggaacaaataccaaacgatagatgggtcactgtggctagctgtaaaggtttcaactcattagtagcagctgcccagtgccatgtgaaggaacaaa

SEQ ID NO: 2029 - DNA, 1300 bp, Cricetulus griseus
  misc_feature (71)..(90): n is a, c, g, or t
aacatggcatgaaccgagtgcttctgccaacaataagcggaggtactagtgtccaattttaaaaattgggnnnnnnnnnnnnnnnnnnnngtgtaagaattttgtactttaacaaatgaaggagtgcttgtagcttttgaaaaacttttctatgttggggattgtggaatttaaatgtcacacacaaatcctgcttgaaaatggcaaggcaaatatctttttcgaagacttgtaaatcctgaagagagaggtacggttctaggatcaaccatcggtgtgagaaaggttagccgtgaccagagagatgatcagagagatgctggctctgagcaggcctctgccacagcaaatggttcacgtggcgctgtaagcgcagctgggaactggtttcagccagttcaagtggctagtctctgcagcactcagacgctggtgtgagggaacttgttgccatcctggcaccctccttgcaaggctaaaatgtaatgtaggaaggatggggcagtgcattattaggtcacagtgttacaaacccagttcataggctggcagcttaaatccaccagacacctttttctttgtggtatgtgtatttttgtgttttgtttgtttttgtatctgttcaatgaaaataaatatatataacccacattttcacagagtgaaaatttcacatagtctgacaagccaaaaggaatattcatttcaagatctagaagtagaattcataacattttcccccttgactttcacttttaaaacaacaagatctaccacatgagatgagtaagaaaattcactaggagttctctgggtggttttggtgctgaacaatgacatgaccctcacagactgtaaaatagagatagttggaactaatgtacagaactaaatttttttaactttatttgctgttccattctgtgaagtttcagttatctaaactaaacacataaatgtgtaaaagtttcagattgcaaggtaatatgtaatgtagcatttgtaagatattcttgtcaatattaaccagtagaattttgatttgtacagttttaattggttaaaatggtttcattttaacatccactgctatagatgaataatgtaagttcagatttaaagaatggtggggaaatggtgcatgtaattcttttgcaagtattgagagttctgtatgttttgaaaagagtaatgttctggtgccaagaagtggattttctcagagtccattgccagcagtgggcaagcctggcgatcctggcacggagcgttaaccatacaccttactaatagcaaggtg

SEQ ID NO: 2030 - DNA, 595 bp, Cricetulus griseus
gaggtgctgtcctcggatgaaaatgggggtccctatagctcatcccttggaaacgaagagggggagtcaaaaaccttcactaccctagaccctgcatccctagcttggctgactgaggagccggggccagcagaggtcacaagcagctcccagagcccccgctctccagattccagtcagagctgtatggctcaggaggaagaggaagatcaaggacgaaccaggaaacggaaacagagtggtcagtgcccagcccggggcactgggaagcagcgcatgaaggagaaagaacaggagaacgagaggaaagtggctcagctagctgaggagaacgagcggctcaagcaggaaatcgagcgcctgaccagagaggtagaggccactcgtccgggctctgatcgaccgcatgtaaatctgcaacaagtatgaacaattgggactatcattccccaacttgagtgacctcctgtctctcctggaccatcatgtcaatgccaaggatgctgggtagggagaacaaaggtctcagctagtgtgtatatatattgtacattctttattattttattgtctgtacccggtaaagtgactttgt

SEQ ID NO: 2031 - DNA, 1057 bp, Cricetulus griseus
  misc_feature (1001)..(1030): n is a, c, g, or t
aggaagctgtgcagtcctcacctaccgagacttaggcgagaagcggcgaagcggcgggtgggagccgagcgagcgcggggctggcgccgcgcactggggggggcaggagcagcccgcgcgccgcgtgagggactcgcacttgcaatatgactttggaggaattctcggccgcagagcagaagaccgaaaggatggacacggtgggagatgccctggaggaagtgctcagcaaggcgcggagtcagcgcaccatcaccgtcggcgtgtacgaggccgccaagttgctcaatgtcgaccccgacaacgtggtactgtgcctgctggctgcagacgaggacgacgacagggacgtggctctgcagatccattttaccctcatccaggcgttctgctgcgagaacgacatcaacatcctgcgggtcagcaacccgggccggctggctgagctgctgctgctggagagcgacgcgggcccggcggagagcgggggtgcctcgcagccccctgacctgcactgcgtgctggtgacgaacccacattcatcacagtggaaggatcctgccttaagtcaacttatttgcttttgtcgggaaagtcgctacatggatcagtgggttccagtgattaatctccccgaacggtgatggcatctcaatggaaataactgaaccaaattgcactgaagttttgaaatacctttgtagttactcaagcagttactccctacgctgatgcaaggattacagaaactgatgtcaaggggctgagtgagttcaactacatgggggctaggagatgactttgcagatggacagaggtgaaaataaagaaggaagctgtgttgaaacagaaatctaagtcaaaagggacaaaaactacaaagaactgtgcaagaaagaaaactgttgatttaggatggctgagttacattaaataagccaaatattgctttgttgaaaccttaaatgtgtagcaatagtttgttttttttttgtatttgnnnnnnnnnnnnnnnnnnnnnnnnnnnnnntgatctttatgccctcaagtaaaagga

SEQ ID NO: 2032 - DNA, 1240 bp, Cricetulus griseus
gtgtgtacctgctcgcgtgcaatccgccgccatcgcgctttgggcgagcattgtaatgggtagtagagaggcggcagccgagcggaggccgacctggctttggcgatggtggcgcgcgctctggaggaccgatcggagaccagcgccaggagcgctcactgatgtggaggtgacggaggagcttttggtgtgacctggcgccatgtgtgtgataccacacgagcttgaccgagcgtgccacgcaatcataattcagcgaaccttttgcttcgatgaggtgtgaagtggtgcgtccacctcttgcccctacagaaacttgcaagaaagaagcctatgggaagcaacttgaggcagaggcaggcatcgtgttggtgatgactagaagacatacgtggcttggaagatgacgtgaaatacacaggaaaggaaagaagtaaaaggatgttttgcttaagagtatgccatttgcaaattcattcaataatttggagatttatataagggcctgttcagacagtggtgtttctgattcctgctaaggaaagtgctccacacaagcctgatgacctgagctaattcctgaggcccacagggtggaagatgagagttgactcctgaaagtatcttcaaaccacacatacacaataagaaaaaacaatatagtaaagctgaaacattagagtgttgctgttttattgaaatgtaaaatggtacaagtaattatggaacaaatgtattccataccttgtgacagttttgtgtaaaaccttaccctcttctaaatgagaaagggattaaagttgtcaaaagaatttaacttttaagtctttcattttcttttataaaggtttatttctgatggtatgttgtatgtttgtgtgccctcatacagctggagttacagacagttgtgagctgcctgaggtgggtactgtgagcaacatgctctcacaagtaccaagtcatctctccagcccaactttttgtgaatgaatttgaaagtttttgcattttggagaaaaagcaaaagggaggtgtgctgttgtaatgtggcagttgccaatcaaaatgaactgtaacttcttgtcagttgctgcctggtaagaggctagcccagacacaacctactagaagtgtccttattacatttcaggaaccatgccaaatagggtggctgcccaatacaaccaggtagtttgtcttcagatccaattgtactgctgtctgtccggttcatttg

SEQ ID NO: 2033 - DNA, 545 bp, Cricetulus griseus
tgaaggcaatcgaaccctacaaaaaattattagccatggaggatattatggggatggtttaaatgccattgttgtatttgctgtctgttttatgcctgaaagtggtcagcctaactatagatatctgatggacaatctctttaaatatgttattggcactttagagctgttggtagcagagaactacatgatcatttacttaaatggtgcgacaactcgaaggaaaatgcccagtctgggatggctgaggagatgctaccagcagattgatagacgattacgcaaaaacctgaagtctctaatcattgtccacccatcttggtttatccgaacacttttagctgttacaagaccatttatcagttcaaaattcagtcagaaaattagatacgtctttaatttggcagaactcgcggagcttgttcccatggagtatgttggcataccagagtgcatcaaacaagttgatcaagaacttaatggaaaacaagaaccaccaaacagtgagcagtatgttcggtgtcctgtccagatgagacaaagag

SEQ ID NO: 2034 - DNA, 523 bp, Cricetulus griseus
ccatataatgtcagtgaggatccctggctagctgcatacaacttcttgcagaagaatgatttgaatcccatgtttttggatcaggtggctaaatttattattgataacacaaaaggtgaaacgttgggacttgggaataccagtttttcagacccatttacaggtggtggtcgctatgttccaagaacttcaggaccttccaacacagtgcaggcagcagatcctttcacaggtgctggtcgttacatgccaagttctgcaggtatgggcacctccatggctggagtcgatccatttacaggaagtagtgcctaccgatcagcagcatctaaaacagtgaatatttatttccccaaaaaagaagctcttacctttgaccaagcaaaccctatacaaatattaggaaaactgaaggaacttaatggaactgcgccggaagacaagaagctcactgaagatgacttggtacttcttgaaaagatactgtctctaatttgtgataattcttcagaaaagcccacag

SEQ ID NO: 2035 - DNA, 439 bp, Cricetulus griseus
  misc_feature (72)..(72): n is a, c, g, or t
  misc_feature (313)..(313): n is a, c, g, or t
ccctgtactgaccaaggagcagctggacaaccaattggatgcctacatgtcgaaaactaaaggacacctggntgctgagttggatgcctacatggcacagacagatcctgaaactaatgattgaagcctgcctgcctgcccgcctgttagactcttgttaaagtcaccacatctataaaaagaaaaaaaaataatcttgagaaaacatgagaagaaacctgattgatgctggaaggacctatcacaataggctgtggacttacctgccaccagttggcacatttagtctgttccgtctactttttgatactgngttatatgaaaccctattttcctttgatttggttgagtttgttttgttgtttatccagtcacccagacttctgtttgaacaggaatgcattggccttgtgagtgaacatttttccagcctctgcct

SEQ ID NO: 2036 - DNA, 308 bp, Cricetulus griseus
  misc_feature (153)..(153): n is a, c, g, or t
  misc_feature (203)..(203): n is a, c, g, or t
acaagctacaaaatctccagatggtgttaatagaagtgaagcatcccctcctcagtcgggcgacacacagtacctttgcacagaagctccagctccgagtgccttcagtggagtctctgtttcggagtcccataaaggaatctctgttctggncttctaaagagtctttagtgcgaacatcttccagagagtccctgagccancttgacctggactgtcccgctgccacctttgacccaccttctgatatggagagcgaggctgaagacgcaccaggcagctctgacagcctcaacagatagcagttg

SEQ ID NO: 2037 - DNA, 567 bp, Cricetulus griseus
atgaatgacacaaggctttaccatgaggctgacaagacctacatgttgcgagaatatacatcacgagagagcaaaattgctaatttaatgcacgttccaccttccctcttcacggaacctaatgaaatctctcaatatttaccaatcaaggaggcagtttgtgagaagctagtatttccagaaagagttgattctagccctgcggactcacaaagcacaccctcggaatagaatgtggtacagcctactctccgtgtagagcctgcctggacatcttggctgtttgtagggatatttttattatgagaattaatttccttgcttatgctcagattttctgtggccttaaaggaaaataaaagagtgttacaggcaggttccacttaactcccatttatattgtctgtcttaaagttcctactggagttgtatgctctggagcaaaatttggattcctaaatgatcccaaattgtgacctcagcagcagtgatgtgtatgtgtctcaagaggggggacatgatctgcatccatcatgaagcatagtcttctactgtgaagaggctaaa

SEQ ID NO: 2038 - DNA, 566 bp, Cricetulus griseus
  misc_feature (349)..(349): n is a, c, g, or t
gcctttcatcagcaaacttcttggtatgggtgacattgaaggactgatagataaagtcaacgagttgaagttggatgataatgaggcacttatagagaagctgaagcatggtcagtttacattgcgagacatgtatgaacagtttcagaatatcatgaaaatgggcccattcagtcagatcttggggatgattccaggttttggaacagattttatgagcaaaggaaatgaacaggagtcaatggcaagactaaagaaactgatgacaattatggatagtatgaatgatcaagaactggacagtacggatggtgccaaggtttttagtaagcaaccaggcagaatccanagagtggctcgagggtcaggtgtctcaacgagagatgtccaagaacttctgacgcagtataccaagtttgcacagatgggaaaaaagatgggcggtgtcaaaggacttttcaaaggtggtgatatgtctaagaatgtgagtcagtcacagatggcaaagttgaatcaacagatggccaaaatgatggatccacgagttcttcatcacatgggtggca

SEQ ID NO: 2039 - DNA, 398 bp, Cricetulus griseus
  misc_feature (220)..(241): n is a, c, g, or t
gactagctggacattgttcccaccttcactcttccctctggtctttgagaagatcacagtgatttttataaaggttttttgggggagagtaaggatgatcctactcccagccgtctttcttccttacaaaaggaaaagaacgaacagggcatgacatcaatttgagccagtctcagataaaagttctacaagtgttaagaagagccctattgtttgtgannnnnnnnnnnnnnnnnnnnnncaccagcaagcagctgctccctctctccgacttagggttgagggagtagagagggtgtggccacctgcaccccttgtaaagagagtggggcagccttgttagcacagtataccttatcaggactctacgcactgccgggtcgtacaattattactat

SEQ ID NO: 2040 - DNA, 86 bp, Cricetulus griseus
cccaaatacggaaaattgtggatcaaataagacctgataggcaaaccctaatgtggagtgcaacttggccaaaagaagtaagacag

SEQ ID NO: 2041 - DNA, 502 bp, Cricetulus griseus
ctccatcaagctgttccagctcatggtagaacgcacgcctgaggaggaaagtattgactggaccaagatcgaacctggggtcaacttcctcaggtcccctaaagacaacgtggatgaccccactggaaatttccgaagcggtcccctgacggggtggagagtgttcctgctgttgctgtgtgcactcctgggcatcattgtctgtgctgtggtgggcgccgtggtgtttcagaagcgccaggagcggaacaaacgcttctactgagtggccagtctggctggaagggcctgaccttgggccagagctcttaaatgaactttttttctactgggattgtaaaatcaaccaaccaaccttatttcttaactgtttcaaagaaataattaaagtattttcatacatttatgcttctggcccagctgagacagctggcaggactggggctcagggctcccctacagctggaggctcttgccccatctcgaggcatgctcctgggag

SEQ ID NO: 2042 - DNA, 574 bp, Cricetulus griseus
catcaacgtgggacgtgctggagcagccagcctggatgtcatccaggaggtggaatacgtgaaggaggaagccaagatggtgtacctgctcgagtgcttgcagaagacacccccacctgtgctcatctttgcagagaagaaagcagatgtggatgccattcacgaataccttctgctcaagggggttgaggctgtggccattcatgggggcaaagaccaggaagagcggaccaaagccattgaggcatttcgggaaggcaagaaggatgtcttagtggccacagatgtggcctccaaaggcctggactttcctgccatccagcatgtcatcaattatgacatgcctgaagaaatcgagaactatgtgcaccgaattggccgcaccgggcgttcaggaaacacggggattgctaccaccttcatcaacaaggcctgtgatgagtcagtgctcatggacctcaaagccttattgctggaggccaagcagaaggtaccgcctgttctccaagtgctgcactgtggggatgagtccatgctggacattggaggagaacgtggctgtgccttctgtgga

SEQ ID NO: 2043 - DNA, 318 bp, Cricetulus griseus
  misc_feature (190)..(210): n is a, c, g, or t
gcagcaggccggaatccgtgtccatcggtcctcctgaacccgcgcagacgtcgtcaaagttgccatgccggagaacgtagctcccaaaagcggggcgcccgccgcggggccgggcagccgcgggaaaggcgcctaccaggggggggacaagccggcccagatccgcttcagcaacatttccgcggccaannnnnnnnnnnnnnnnnnnnngacaagccttggacctaaaggaatggacaaaatgatccaagatggaaaaggtgatgtgaccattacaaatgatggtgccaccattctgaaacaaatgcaagtattgca

SEQ ID NO: 2044 - DNA, 556 bp, Cricetulus griseus
  misc_feature (176)..(176): n is a, c, g, or t
  misc_feature (521)..(521): n is a, c, g, or t
tggatagacttaagcccacaatttgaattgctgctaggagttacaaataatttctctgttccagggccaccaagttatgggttttagagagtggggatgagaattctgatcttggcttctaagtgagaaaccaggtatttgagtttccaagacttcaggcaggcatcacatcctanggctggtggatattgcagtgtaacatgggccctctggcatctcaaagggggtgcttaggaatgtgagaaggttctcgtatttattcagtagtgttttcttggtcattgttgtccttcctttagcttcagatctccagctgcagctggggacccaggaaggagtccattgtaaaacctgggaagaacttatgagtgtttggttgtggataaggtcactgccctaggtagaccaaacagaagactctgggtgaacagcattatgccaggcagagtcaagaacagtgttaatttaattcctcaagcagtttaacaggacaatgtccatctggaaggaagctcacctangtttgtggtaacaacagcacatatcagaagccaga

SEQ ID NO: 2045 - DNA, 517 bp, Cricetulus griseus
gcgttcgtgtgctcgggtccgaatcactgagggaggaggcggtggaggaagaggtggcggcggtggcggtggtcgtagcggtggcggaggaggcgggtacgaatcakctgcgggcagagacatggccaacatcgcggtgcagcgaatcaagcgggagttcaaggaggtgctgaagagcgaggagacgagcaaaaatcaaattaaagtagatcttgtagatgagaattttacagaattaagaggagaaatagcaggacctccagacacaccatatgaaggtggacgctatcaactagagataaaaataccagaaacatatccatttaatccccctaaggtccggtttatcactaaaatatggcatcctaatattagttccgtyacaggcgctatttgtttggatatcctgaaagatcaatgggcagcagcaatgactctgcgcacggtattattgtcattgcaagcactgttggcagctgcagaaccagatgacccccaagatgcagtagtagcaaat

SEQ ID NO: 2046 - DNA, 522 bp, Cricetulus griseus
gggagccttcaaagccgtgatgatggccataaagcagctgagcagtgaggagctagagcagttccagaaaatgggagtattgttgtggaaggccatgaattgcacgaagaagatattcgcctcatgtactcctttgaccaggccacaggagggactgcacagtttgaggcgcactctgatgctcaggctttagttctcttagacgtcacacctgaccagtcaatggtggatgaaggcatggctcgggaagtcatcaatcgtatccagaaacttcgaaagaagtgcaatctggttccaacggatgaaataacagtttawtataatgcaaaatctgaaggaagatacttgaataatgtcattgaaagccacaccgacttcatatttgccactgtcaaagctcccttgaaagcatacccagttcctacatcagataatatccttattcaggagcaaacacagttaaaggggtcggaactggaactcacactcaccaggggatcctgtgtgcctggtcctgcttgt

SEQ ID NO: 2047 - DNA, 548 bp, Cricetulus griseus
atactaagaggtaccaggaagcgttacatttgggttctcagctgctgcgggagttaaaaaagatggatgataaagcccttttggtggragtacagcttttagaaagcaaaacataccatgctttgagtratckgccgaaagcccgagctgccttaacctytgctcgaaccacagccaatgccatctactgcccccytaaattgcaggctaccttggacatgcagtcaggtattattcatgcagcagaagagaaggactggaaaactgcttactcatacttctacgaggcatttgaaggctatgactctattgatagccccaaggctatcacatctctgaagtacatgttgttgtgcaaaatcatgctcaacaccccataagatgtccaggctttggtgagtggaaagcttgcacttcgatatgcagggagacagacagaagcattgaaatgtgtggctcaagctagcaaaaacagatcactggcagattttgaaaaggccctgacagactaccgggcagagctccgggatgacccaatcatcaacaca

SEQ ID NO: 2048 - DNA, 1267 bp, Cricetulus griseus
  misc_feature (747)..(765): n is a, c, g, or t
tggtaccatgattgccttgtaggcatgaggtcatgggttgttgattccctagtccttaaaataattatagcwrtrayrgwtaacaggtaggtccaagggagagtacgtggtatctaatcatcccttatgcttcargacccacttcataaccagaactctggatgctcaagtcttgtacaagattgtrtttgacctatgcacatctttcatgctggattgcttgtagcactgaacacagwgtaaatgctaacataaatgattattatactgtgctttgtggtaagtaaaagtkcatattcagtacagatcaaatattaatatgcagktggtttgaacctttgggtgccttggcccacagatktgaaagggcagktctatatgctaatttttgtcatttttcgttgattttgtgctttaaccattctaagatgttttactacttaactgttacttttagtggtaatggtaactggttaactcttttaaatagttatttaccacttagcaaaatctgttcataattatagtggaagagatgttagtcataaggtgagagtgagttgggaagttacaagagttgggaaaacttttagcactaccagtcctgggcctggataatcttgtagggtctgacctgggttggatgtttaagtagaatctctgcaccctgtacactcagtatcatttagcgcccctttgctaagacaaccaccaccaaaaaatggggggtgggttgggttttgaggnnnnnnnnnnnnnnnnnnncctggctcttcttgaactcactctgtagactagtctagccctggaactcaggatctacctgcttctgtcttccaagtgctaggattaaaggaacggactaccatacccagcaataaccagaattttaatgcatgataccaagtgtccaataggggcagagatacctctagttgagaaccactcactgttctgtagtcagggcttactttagaggtggaaacacaagggaatagcagtgagaaagtttaggatgagtgtgatgaataggcatatattataaggagattttgatgttatagattaggcatatattgagattgtgtcttgattgatgaactttttaaaacttgctacaggtgtgtcaaatttgagatcttaagacagctttagacttaaatgctgtgtaatgaataattttttcttataaaaattttgtaaattttgttaatttcttgataactcaaaagtttatttatttatcttcgaagatacaactatgtag

SEQ ID NO: 2049 - DNA, 532 bp, Cricetulus griseus
  misc_feature (390)..(446): n is a, c, g, or t
accatcactgctgctgctgctgttaccaccaccactgaccccagctacattcctcaactatcaaattctccaagttctcaaaactcactgtaatgctttcagggccaccattgaccctatctgagccacccatctctccacaagaagcaaatcacctcctcccctcactccagcccctgcaaagggaagaagaacagcctatcagtctgtccctagactcctcaagacaggagttaggaacaatggggaggaaccttgagcctcagagggataaagaccaaaccacactccctagtgtctatgggcaagctcctcaaaattcaaatgaaatggtcaaggacacccatgtgagaagacctgcccatggccacaccagcttcagtgccactnnnnnnnnnnnnnnnnnnnnnnnnnnnnnnnnnnnnnnnnnnnnnnnnnnnnnnnnnctagagatgtcccctaaccaactccatactccatggtcatcatcccacccacaggcagccttctcaccaaaggaaggcagaagtag

SEQ ID NO: 2050 - DNA, 563 bp, Cricetulus griseus
accaaaatcgcctgacacctgaagaaattgaaaggatggttaatgatgcagagaagtttgctgaggaagacaaaaagctcaaagagcgcattgataccaggaacgagttggaaagctatgcttactctctcaagaaccagattggagataaagaaaagctgggcggtaaactttcctctgaagataaagaaaccatggagaaagctgtagaggaaaagattgaatggctggaaagccaccaggatgcagacattgaagactttaaagctaaaaagaaggaactagaggaaattgttcagcctattattagcaaactctatggaagtgcaggccctcccccaactggtgaagaggatacatcagaaaaagatgagttgtaggtgtactgatctgctagggctgtaatattgtaaatattggactcaggaactttcgttaggagaaaattgagagaacttaagtctcgaatgtaattggaatcttcacctcagagtggagttgaaaatgctatagcccaagtggctgtttactgcttttcattagcagttgctcacatgtcttgg

SEQ ID NO: 2051 - DNA, 559 bp, Cricetulus griseus
  misc_feature (475)..(475): n is a, c, g, or t
  misc_feature (482)..(482): n is a, c, g, or t
  misc_feature (528)..(528): n is a, c, g, or t
attatgaaggcacaagcataccaaacgggcaaggacatctctacaaattactatgcaagtcagaagaaaacatttgaaattaatcccagacatccgctgatcagasacatgcttaggarggttaaggaagatgaagatgacaagactgtcttggatcttgctgtagttttgttwgaaacagcaacacttcggtcaggatatcttctaccagacaccawggcatatgsagatagaatakagagaatgcttcgcctcagcttaaacattgaccctgaagcacaggtagaagaagaaccggaagaagagcctgaagacaccacagaagacacagaacaagacgaggaggaagaagtggatgcaggcacagaagaagaagaagaagaggaacaggaaacagcaaaggaatctacagcagaaaaagatgagttataaattatcctctcaccacagatcctgtgtggagagggaatgtganattttanagtcgtttcttttcagagagacttgtttgggatgctccccagcctncttctcccctggactggtaaatgttggggat

SEQ ID NO: 2052 - DNA, 495 bp, Cricetulus griseus
agggctgcgccttcgcatcacagagtctgaagaggtggtcagccgagaggtgtccggcatcaaggcggcctacgaggccgagctgggggatgcccgcaagaccctcgactccgtggccaaggagcgcgcccgcctgcagctggagctgagcaaagtgcgtgaggagttcaaggagctgaaggctcgaaataccaagaaggagggtgacttgctggctgcccaggcccggctcaaggatctggaggctctcctcaactccaaggaagctgcactgagcactgctctcagtgagaagcgcacactagagggcgagctccatgatcttcgggggcaggtagccaagctcgaggcagccctaggtgaggctaagaagcaacttcaggatgagatgcttcggcgagtggatgctgagaacaggctgcagactctgaaggaggaactggacttccagaagaacatctatagtgaggagctgcgtgagaccaagcgccggca

SEQ ID NO: 2053 - DNA, 418 bp, Cricetulus griseus
  misc_feature (131)..(174): n is a, c, g, or t
  misc_feature (238)..(273): n is a, c, g, or t
atggcggcgtccatgttctacggccggcagttggccgctgccgtcctgaggagccaccggccgcaggctacactgcgggccgccgcccaggttttgggaaattctggattgtttaacaagcatggcctccnnnnnnnnnnnnnnnnnnnnnnnnnnnnnnnnnnnnnnnnnnnnttgagtatggaattattgcaggaagctggtgtctctgttcccaaaggcttcgtggcaaagtcannnnnnnnnnnnnnnnnnnnnnnnnnnnnnnnnnnntcaaaggatgttgtgataaaggcacaggttttagctggtggcagaggaaaaggaacattttcaagtggcctcaaaggatgagtgaagatagttttctctccagaagaagcaaaagctgtttcctcacagatgattgggaagaaat

SEQ ID NO: 2054 - DNA, 571 bp, Cricetulus griseus
ggcccctgagcttccacgacatgttccagcctttcctcgagatgatacaccaggcgcaacaggccatggatgtccagttccacagcccagccttccagttcccggacatggatttgttaagagaaggtgaagatgaccgtgcagtgtgcaaggagatccgccacaactccacaggatgcctgaagatgaagggccagtgtgagaaatgccaggagatcttgtctgtggactgttcagccaacaacccagcacaggctcacctgcgccaggagctgaacgactccctccaggtggccgagaggttgacccagcgatacaacgagctgctccattccctccagaccaagatgctcaatacctcatccctgctggagcagctgaacgagcagttcaactgggtgtcccagctggctaacctcacacagggcgaggaccagtactaccttcgcgtctccacagtaacaacccactcttctgactcagaagtcccctcccgtgtcacgtaggtggtggtgaagctgtttgactctgaccccatcacagtggtgttaccagaagaagtctccaagga

SEQ ID NO: 2055 - DNA, 533 bp, Cricetulus griseus
tgagcctgccaaagcggctctaaagggtgactctcgccagcagaagcagaagcgcgagacccaagatgaggcagaactcctcactgtccctgatggctggaaggaaccagctttctccaaagaggacaatcccagagggctcttggaggaaagcagctttgcaaccttgttcccgaaatacagagaggcttacctgaaggagtgctggcctttggtgcagaaagctttgaacgaacatcatgttaaagcaacactggacttgattgagggtagcatgactgtgtgtacgacgaagaagacttttgacccttacatcatcattagggccagagacctaataaaactcttggcgaggagcgtttcatttgaacaggcagtacggatacttcaggatgatgttgcatgtgacatcattaaaatcggttccctagtgagaaataaagagagatttgttaaaagaagacagcggcttattggtcccaaaggatctacattgaaggcattggaactcctaacaaactgttacgtcatgg

SEQ ID NO: 2056 - DNA, 395 bp, Cricetulus griseus
tcctgtttgggttcgcagtgcaccgcaagcccgcgaagagtggcgaccgggagacatggacccctgtggctgacttcactcaccatgcccacaccgcctccttgtcagctgtggcatcgaacagtcgctttgtagtcacaggcagcaaagatgaaacgattcacatttatgacatgaaaaagaagatcgatcatgggtctctggtgcatcacagtggcaccataacttgcctgaaattctatggcagcaggcacttaatcagtggcgcagaagatggactcatctgtgtatgggatgcgaagaaatgggaatgcctgaagtccattaaagctcacaaaggacatgtgactttcctttctattcacccgtctggcaagttggctctgtctgttggt

SEQ ID NO: 2057 - DNA, 517 bp, Cricetulus griseus
gactatactaattgcagttataagccaaaaagacttaaaagacatgaaacagactcttggagataacattaccgtgcaaatgtattctccatcctggcctaactttgactatactatggtggttatttttgtaattgctgtgttcactgtggcattaggaggatactggagtggactcattgaattggaaaacatgaagtcagtgacagatgctgacgagaaagagacgaggagaaagaaggacgagtatttgactttcagccctcttacagttgtcgcatttgtggtcatctgctgtgtaatgatcgtcttactctatttcttctacaagtggcttgtttatgttatgatagcaattttctgcatagcgtcagcagtgagtctgtacaactgtcttgctgcattggttgataggatgccatgtggacagtgcacgatttcctgtttcggcaaaaatattaaagtgatcctgattttcctctctggactgtgcatctctgtcgctgttgtgtgggct

SEQ ID NO: 2058 - DNA, 523 bp, Cricetulus griseus
  misc_feature (166)..(178): n is a, c, g, or t
gctcccatttcctgggagcaggccgacccctttgcatctttaaaaaaagtgggccaagattccatagtgctgctgatttgtatcacggtgtttctctcctacctaccggaggcaggccagtactccagcttcttcttatacctcagacagataatgaaattttccnnnnnnnnnnnnncagcctttatagcagtccttggcattctgtccattattgcacagaccatagtcttgagtttactcatgagatcaattggaaataagaataccatcttattgggtctgggatttcaaatattgcagctggcatggtatggctttggttcagaaccttggatgatgtgggctgctggggcagtcgcagccatgtctagcattacctttccagctgttagtgcccttggttcacgaactgctgatgctgatcaacagggtgttgttcaaagaatgataacaggaatccgaggattgtgcaatggtctgggaccagccctttatgggttcattttctacatattccatg

SEQ ID NO: 2059 - DNA, 594 bp, Cricetulus griseus
gtgagtcgccgcagcaacagctatggtgtcagtaatcaacaccgtggacacctctcatgaggacatgattcatgatgcccagatggactattatggcacccgcctadmaacctgctcstssgrcaggtccstcaaaatctttgatgtgcgaaatggagggcagatcctcattgcakaccttasaggacatgaggggccagtatggcaagtakcctgggcccaccccatgtrcsgcaatakcctgrcctcctgtksctatgaccggaaagttattatctggaargaggaaaatggcacttgggagaagactcatgagcactcaggacatgactsctsagtgaactctgtatgctgggcccctcatgattatggcctgattttggcctstgggakctcggatggggccatctccctgctgacctatacaggggaaggccaatgggaagtgaasaagattaacaacgctcacacgattggctgtaacgccstcagttgggcccctgctgttgtgcctggaagcctcatakaccaaccatcagggcagaagcccaattacatcaagaagtttgcatcaggtggctgtgacaacctcat

SEQ ID NO: 2060 - DNA, 245 bp, Cricetulus griseus
  misc_feature (76)..(97): n is a, c, g, or t
cacagcaaccgtggtgtcctaactaccgtctttttgctaggacttaaactgacttgaatgcagcaaaaagttgacnnnnnnnnnnnnnnnnnnnnnnggcaaggataaaatgaacaatcttttgtggtttcttgggaaaacttttcataccaggtgatcaattcagaaccccattattacctgcaagtgctgatgtgatgtgcagaasccacagtaaaacgaaaaacatccaaatgtacaaaccg

SEQ ID NO: 2061 - DNA, 598 bp, Cricetulus griseus
  misc_feature (408)..(449): n is a, c, g, or t
ttcaggaggatgtgcttaggcttctgacactgtgtgtcagaacggcactatttcagtttatagccctctcatacatagtacagtagttgattaaaaaacaaaaccagtaaaatggcatttgcctcacagttattaactatcaatctggctagatcttcatgcagtaacctaaatgtgatatattgggtgtgagagaactgtgttggggtttttagattttcgacactagtttgcctctttaattttcacaacccyttattagcaagttccttttatatataggccctaaaattgggatagttaaaatatggttgttaattatgattagcctttggtgaaaataggtttaaagtctgttttgattccaatgtttctcccaaagaattctgtgttaaatatacaccaagnnnnnnnnnnnnnnnnnnnnnnnnnnnnnnnnnnnnnnnnnncctggaaataggagtaagtttgtatgttattgtkgatagagcaactcaggtaatttccatttctggttttctattctctgkgtaractacctgggkgtcactttctarccagcaaggggcttcactgctgtctagatgtctttcataat

SEQ ID NO: 2062 - DNA, 592 bp, Cricetulus griseus
gcgtcctacctaaggtacgctgggagacgctgygatggcsagktcrgcagccgcagcctccttccttgctccgactctggagcarctccggcacctgscagcggasctgcggtcacttctgcctctagtgarggwcrgcgaagcccaggakacakccgaggaatttaatcgagagaygttctggagaagacttaatgaggcagcagkgaacctgtcaggggaagccackattctgaccacacttttckcccgacttccactgccgtctccacrggaaacccakaggatctgtgagcaaatkcatgttggcatcaarsaaattattgamstatatyattcacttcctaaaaatcasgggatcaccctgagaaagctggtgcggaatgctactwtggacgttgtggatggcatggctcatctyctggwagtgcttatctctccatctyakagcactgagaactgygaccttattycckgcwatagtgtctcggtagcatgccaaaaggtgtctgagattccaaaagataacaaggctgcagcccttatgatgctgacaaagtgtgtgaatcctgtgaaagatgcacatgaagaa

SEQ ID NO: 2063 - DNA, 425 bp, Cricetulus griseus
tttgactagcatttcaaccttctggggtccctaacttcgtcccaaagtcagcasgaagcagtytggaaaagaatttcrcygtccattttccctggttraaatgctaagtcaaaakgaactcccttgcatggggatgacagtatctatcactccctgatggggatgctagagagacagcamttccatgattggaatttacaaaaaasaaaatgggggaatgaasgaaccggcttcccttttggcagmcataayagccsaacatgtgcttgscatatacctgccttggtcacttakaggtcakatgccygtcttgtgacaaggaaccaatcagaagttagctggtggcgctatgctttacgaccctgggtgtgctttacggacaagcgcacagcaatgacgtagagagcatagcaaccaccctggga

SEQ ID NO: 2064 - DNA, 548 bp, Cricetulus griseus
tggtgtggcctctcggccaaagctcccatccacagctgggatgtctgagccacakyctgctgcactgttwycgctctgggatcttctgagttacttttttaggctgtggtttggygamargawccmacacattaacgatyytttttttccccaaaagcchctgwawaattcttggcatgttttsatgkccctgttggctgcctggtttgggagcagttgtggaraadaggacagtmccacacagagtgtggaattttgggagctgcttgkggcctgcctgtttctggcatgtaccctgggcgtgtgctgwacctgctgggccagctgcgcacgtttctaccctgtccctggagcahcascgtgagcascatgagtgkctctggaagyttaaagtggagtgttctakgaagtgtccctgacavaattccctgttctctatgaccccatttgggctctcagcccctytakcaactttatgccccggycctatctttgctcccgtcctctcygtctgctagtccttgaagcctttaaccaaatgggagtgg

SEQ ID NO: 2065 - DNA, 548 bp, Cricetulus griseus
gggaccacaaaaatctctgctccactctatatgtgtgggagcctctggtgctctcggaggcagtgacgtggtaaattgcccctggggacaccaggcacagggtggctcgtagaggataggccttcagtgccagctttcctccacctccgcacaacttcctcagagggcttcaagccaaaccaatagcctttttgtgtgaaacatctttgaggtgggaaagggaccactggagctttgctagcaataactgactttcagtttactgttttgaaggagcagggactcagcacagaattcactttaaatggagctgaaggagtgtccctcctctgtgtgaaaagaaaatagttttattcttcattctgactttttaaactgtttgacttccagttagtttgaatgagagtaataatttttctacatggactcaaagggtaggagcattaactgtcatcattgtgatgtgtggtgtgtgccttcccttggatgtcacagccattgagttccttgtgggcctcatggtcttgctcttgttagttctaatgata

SEQ ID NO: 2066 - DNA, 528 bp, Cricetulus griseus
taaacagccactgctttgcgagtcgctttcctgggcctgcgtccgagtatccaccgctgtgggcagctcakacgccgaagctcttaactgcagctatgagcagcaacgagtgtttcaagkgkggacgatctggccattgggccagggaatgccctactggcggaggccggggtcgtggaatgagaagccgaggcagaggattccaatttgtttcctcatctcttcctgacatctgttaccgctgtggtgagtctggtcatcttgctaaggattgtgatcttcaggaggatgcctgctataattgcggtagaggtggccacattgccaaggactgcaaggagcccaagagagagcgagagcaatgctgctacaactgtggcaagccagggcatctggctcgtgactgtgaccacgcggatgagcagaagtgctattcttgtggtgaatttggacatattcaaaaagactgcaccaaggtgaagtgctataggtgtggtgaaactggtcatgtagccatcaattgcagca

SEQ ID NO: 2067 - DNA, 555 bp, Cricetulus griseus
tccggcggtcacagtagccgatcgggtcgggtcgcatcgtctcctgcgcgcatcctcggatctgatttaaaccaccaccatgtcgagcaaaaaggccaagaccaagaccaccaagaagcgccctcagsgkgcracatccaatgtgttcgccatgtttgaccagtcccagatccaggagttcaaagaggccttcaacatgatcgaccagaaccgggatggcttcattgacaaggaggacttgcatgacatgctggcttctctaggcaagaatcccaccgacgcctacctggatgccatgatgaatgaggccccaggccccatcaacttcaccatgttcctcaccatgtttggagagaagttgaatggcacakatcccgaggatgtcatcagaaatgccttcgcttgctttgacgaggaagcaacaggcaccatccaggaggattacctgagggagctgctcacaaccatgggcgaccsgttcacakatgaagaagtggatgagctgtacagggaggcgcccattgacaaaaaggggatacttcactacatcgagtt

SEQ ID NO: 2068 - DNA, 565 bp, Cricetulus griseus
  misc_feature (189)..(205): n is a, c, g, or t
  misc_feature (445)..(445): n is a, c, g, or t
ccaaagcctccaagtcactggatgggaagcactgctgaaaatcccagccatagcagggagctgatggcagtgcacttgaaaacactcctcaaagttcagacttagattttagttttcaatgtgtatgttaaatatagattttccccaactccttggactctaaaaggaaatggatacaacagtggaaannnnnnnnnnnnnnnnntatgacaggagattaagtcacatacaagcagcttgtattatattttatattttgtaaatactgtataccatgtattatgtgtatattgttcatacatgagaggtacattatagttttgttatgaaagtatgtattttgccctgcagatgtggtgggtgttttgtatatatatagtggagctattttaagtgggtgcttaaagcacatggaagactgtttgcacaggtactgaattttttntaaggacagctgtcaaatctcaagttcaaaatctcaatgtgaaacagcctacttatatactactgaaggttaaatttggcacaatcactgtaaacatggaacttggctgtgtgtctctaa

SEQ ID NO: 2069 - DNA, 476 bp, Cricetulus griseus
gtaatcaactgtttccccaagcagtggtttgtgaatctgaaaggagaaagaactatttctcagttagaaaatttttgccggtatcttgtacatttagcagatacaatttatagaaatagtattgggtgctctgacgtggaaaaaagaaatgcaagagaaaacataaaacagatagtaaagcttcttgcaagtgttcgggctttggatcatgctgtgtctgttgcaagtgaccacaatgtgaaagaacttaagtctctgattgaaggaaaatagatctgagaccgaaaagtgtttgctttgctaccattcccagtgtgtaaattttgtatatatgtaaagtttcttaaactgtaagataactgcttaaatacaaaaacattatattaatactgagtccttaaatgtgatttcttcagaacgaaaggaattcagattatttctaggagtctatgaatgttttccttactgcctgtcat

SEQ ID NO: 2070 - DNA, 420 bp, Cricetulus griseus
tgacacttttgcagggaaaacagagctggtgggacatggccaagcaaagttcaggcagtctctctagccttccattcttggagggcatggaccccacctactctgtggctgctgaattggctccatttagttgcagtggtaggaaacggtagtctggcttgactgggccacttctacaatgtaagcaagtgacaggttctccatgacatcgttgttttaaagtttcccacaaatacttatacttactaaagtggaaccattgggaagtctttccagtattccattccaggatgcttttgttcatttctctcttgtcttttaaaataagaaacttgagatgactttgatcatcagcgacttgtcccccaggctgataatgcctggcttgaaaatagaagatgggctctcaaaccatacaaa

SEQ ID NO: 2071 - DNA, 647 bp, Cricetulus griseus
cccttcattgacagccagcatgtcatccacaaatacttcctgcctcgtgcctacgctgtcctcatcccgctggccacgggcctcctgctgctcctatttgtgggattgtttatcacctatgtgatgctgaagagccgaagactgaccaagaaggctcagtgagggtccagcagggatgaggataccagccttctccatatctcctccagggaagggaccaagtgtcacatcctgatacagtcagcctgactgctgcagtcctctttaggaggtggggctgcttacagctcaactctgacaaactggagccctctcctctcttattcatccttctggaagccaagaggaacgtgggttgggaaacctctccctcatggcttcgggctcagggcctgaacattgctggtcctgtccacctacagtcaaagctctctgccactcccacaaggttctgctctcttgcctgtttttcctcctgtcatgtgctgatagatgctgcaggctccccgtttgtgtgcagcctcccctcgccgtacaacctatctcttcacatggcagctcttttgagtctgacactgtccagactccatgaggacttctgcacccagaaagccctagtcccagctggcctgtgtttgggaaaactt

SEQ ID NO: 2072 - DNA, 433 bp, Cricetulus griseus
ccaggatggttattcactggaagaatgcctcgagttcatagccatcatctatggcaacactctgcagtccatcctggccatcgttcgggctatgacgacactcaacattcagtatggagattcggcccgacaggatgatgcccggaagctgatgcacatggcggataccatcgaggaaggcacaatgcctaaggagatgtctgacatcattcagcgcttgtggaaagactcgggtatccaagcttgttttgagcgagcctccgagtaccagctcaacgactctgctggctactatcttctagacctagagcgcctggtgactccaggatatgtgcccactgagcaggacgtgctgcgctctcgtgtcaaaactgctggcatcatcgagacgcagttctccttcaaggatctcaacttcagaatgttcgatgtg

SEQ ID NO: 2073 - DNA, 487 bp, Cricetulus griseus
tgaaagagtaccacgcaaactcaaatgtacttttacatcccccaagactctagagcatgaaggtcgtcattatgaatgtgatgtccttcctttcatggaaattgggtcagtggctcataagtattatcttctaaatatccggctaccagtgaatgagaagaagaaaatcaatgttgggattggggagataaaggatattcgattggtgggaatccaccaaaatggaggcttcactaaagtgtggtttgctatgaagaccttcctcacacccagtatcttcatcattatggtgtggtattggaggaggatctccatgatgtccagacccccagtgctactggaaaaagtcatttttgcccttgggatttccatgacctttatcaatatccctgtggaatggctttccattggatttgactggacctggatgctgttatttggcgacatccgacagggcattttctatgcaatgcttgtttctttctgg

SEQ ID NO: 2074 - DNA, 556 bp, Cricetulus griseus
ctgtgacagacattctaaattgtttgaagaacctgaagatcccagcaacaggtcttttttttctgaaatcatctcctctatttctgatgtaaaattcagccatagtggtcgctatatgatgactagagactattggggaggcaaaatttgggacttgaatatggaaaacaggcctgtggagacataccaggtacatgaatacctcagaagtaaactttgctcactctatgaaaatgactgcatatttgacaaatttgaatgttgttggaatgggtctgacagtgttgtcatgactggatcctacaataatttcttcagaatgttcgacaggaacacaaagcgggatataactctagaagcatcacgagaaaacaataagcctcgcacagttttgaagccacgcaaagtctgtgcgagcggcaagcgaaagaaagatgaaataagtgttgacagcctagacttcaacaagaaaatccttcatacagcctggcaccccaaggaaaacatcattgctgtagcaactacaaacaatctgtacatatttcaagacaaagtg

SEQ ID NO: 2075 - DNA, 534 bp, Cricetulus griseus
gctgctcattgtagccatgggtggtatctgtgccctctttggccttccttggttggctgctgccactgtccgctctgtcactcatgccaatgccctcactgtcatgagcaaggctgtggcgcctggggacaaacccaagattcaagaggtcaaggaacagcgtgtgacagggctgctggtggccctgcttgtgggcctctccatggtcattggagacctactacgacaaatccccctggctgtactgtttggcattttcttatacatgggagttacttcccttaatggaatccaattctacgagcggttgcacctgctgctcatgccacccaaacaccacccagatgttacctatgtcaagaaggttcggaccatacggatgcacctgttcaccgccttgcagttgctctgcctggccctactctgggcagtcatgtccacagccgcctccctggccttccccttcatcctcatcctcacagtgcctctgcgcatggtggtacttacccgcatcttcaccgagcgagaaatgaa

SEQ ID NO: 2076 - DNA, 100 bp, Cricetulus griseus
ttttccatctcagacggaatctatggatctacattctttatagcaacaggttttcacggtctccatgtaatcattggaacatcattccttacagtatgct

SEQ ID NO: 2077 - DNA, 568 bp, Cricetulus griseus
atgccaagtgactcgcctattgcctgaaggcttttagagtctttagatggccttctgactgtctagggttctttccaacccgtgcagcactcacaggccaagactccggcttattcccgtcacaaccagatatgtagtgaggagagtcctggactcagtggtgaggagaagccacgaagacaggaatttgccgcttcatctgtcggcatgctgttcctagaagtctgccctgagaggggggtgtctttgctgggagagtttgatgctgagcaccatgctgtgatgggggaaggtttgaagaatgtgtcgaaactttctggattcttctcaaagatgaattcctaagccaagctacaagttcatccaggctcagaattccaggattgtgggcaggagccatcatcttcactatatttttagatttttttaaaaggtggaattgaggatccagatctagagggagacaaggaaggtaaggagaaagttgtagcagttgagctagaaagtcttgttagaatttttgatggggctgactggacagggggaaatgtggtcctatcccttttat

SEQ ID NO: 2078 - DNA, 546 bp, Cricetulus griseus
  misc_feature (57)..(85): n is a, c, g, or t
gcagctcattagagctacgtatggtgacactataaacagaaaaatagttgaccacgnnnnnnnnnnnnnnnnnnnnnnnnnnnnngctgactcagtgaagcgtttcagagatgcattttggcccaatggcattttagcagagactgttccatgcagagataaatctattcgaatgagaacaagaattgcaggaaaaacaaaattatttgcaattatgccagatgaactgaagcacattattggagctgagacaacacggaaaggtattcttcgtgtttttgaaatgtttcagcacaaccagttaaataggagaatggtgtatgtcttcttagaaagctttttagagaccttatttccacagtataaattccgtgaacttttcaacaaacttcattcaaagtcaaagcagatgcagaaatataaacagaaacttcaaagtactcaagcgccttctttacagaaaaggtgacactccaacctgtaaagccggtgttcatttgtccaggactaacaatgtggacacaccttccgcagtgtcatcataag

SEQ ID NO: 2079 - DNA, 352 bp, Cricetulus griseus
ttcctgcggctgctgatgcccgcagcccccgcaccccaccgcggctcctacaagccggtgatcgtggtgcacgggctctttgacagttcctacagcttccgccacctgctggactacatcaatgagacgcaccccgggaccggggggacggtgctcgacctcttcgatggcagagagagcttgcggcccttgtgggagcaggtgcaagggttccgacaagccgtggtgcccattatggaaaaggcccccgaaagggtgcatctcatctgttactcccaagggggcctggggtgccgcgccttgctgactgtttcggatgagcacaacgtggattctttgatctgcctggcct

SEQ ID NO: 2080 - DNA, 483 bp, Cricetulus griseus
aatattgtccggagcacaaagaatacatgatcctcagttgctaacagagagagctttgcaccatggaattgatttggagaaaatcaaagcttacattgattccttccgctttggagcccctcctcatgctggtggaggcattgggttggaaagggtgacgatgctgtttttaggactgcataatgtacgtcagacatccatgttccctcgtgaccccaaacgactcacaccttaaagccacactgttttttctctccagtaatctgcagttgatcagattatacctgagaaacttaagttatgcagtaacttaagtagaataactgtcttactaaagtgccacgattgctttttaagtagttcagtacaaattaagaaaaagcattttgaacttcagatatgtttcagtaggaaatgcttgaacatttgaaatgagaaatttttatggttaaaattcctagtctgtctctacagaaatgttaa

SEQ ID NO: 2081 - DNA, 508 bp, Cricetulus griseus
tccaagataagcagcgcgaaaatctactgcgtggcttgtcaggagctcgactcagatgtggataaagacaatccggctctgaatccacaagcggccctctctcaagctcgggaacaccagctcgcctccacgacagagcctgccacaggctctcgtcccacaccccatcccccagtaccccgtccagagcactgtgagggagctgcagcagggctcaaggcagcccatgggcctcccctacctgctgcacctctaaatacagatgtggtggcttacacacagacagccctcctgcagaagctaacctgggcttcagctgagctgggctctaccacctccttggagactagtattcatctgtgtgggcttatccgggcttgtgctgaggccctgtgcagcctgaagcagcttcagctctgagacctctactccaacctgtgttcccctgagaaaaaccctctagaaaaacagctgttcctctgtgcggcttgttcctttcttggttctg

SEQ ID NO: 2082 - DNA, 259 bp, Cricetulus griseus
tgtatgccggcatttgcaaagtggggtaccacgggatgtgctgctcttccagcatgaacggggccgcttctttgccatccttggactgttttgcgctggtcagggcatcttctggacctccctggctgttgcatcattgtcccgacctctgatccgggttcctgcagaggctcccaaccggggctacacggacctgtgctctgcactctggcgctacgggctagctattggttgcggcacgatgggagccttggtcctt

SEQ ID NO: 2083 - DNA, 472 bp, Cricetulus griseus
  misc_feature (167)..(226): n is a, c, g, or t
aacattgtttgaggattcctttcaacagataatgagcttcagcccgcaagatctgagaagacgtttgtgggtgattttcccaggagaagaaggtttagattatggaggtgtagcaagagaatggttctttcttttgtcacatgaagtgttgaacccaatgtattgcnnnnnnnnnnnnnnnnnnnnnnnnnnnnnnnnnnnnnnnnnnnnnnnnnnnnnnnnnnnnaatccagaccacctgaaatatttccgctttattggcagatttattgccatggctctattccatggaaaatttatagataccgggttttctttaccattctataagcgtatcttgaacaaaccagttggacttaaggatttggaatctattgatccagaattttacaattctctcatctgggttaaagaaaacaatattgaagaatgtggtttggaaatgtacttctctgttgataaagaaattctg

SEQ ID NO: 2084 - DNA, 518 bp, Cricetulus griseus
gttactctacagacaaaaagtcctgaagggcgctttcctgatctgagcgcagagctgaaccgatgggatacagcttttgaccatgagaaggctcggaagacaggactcatcactcccaaggcgggctttgatcctgattatgaccaagcacttgctgacatcaaagagaatgaacagagcctcctagaatacttggataaacagcgcagtcgcattggctgcaggaccatagtctactggggaattggtaggaaccggtaccagttggagatcccagagaattttgctacccgtaacctcccggaagaatatgaattaaaatctactaaaaagggctgtaaacgatactggaccaaaacaattgagaagaaattatctaatcttataaatgctgaagaacgtagggacatgtctttgaaagactgcatgaggcggctgttctataactttgctaaaaattacaaggactggcagtctgctatagagtgcattgcagtgttggatgtcttactgtgcct

SEQ ID NO: 2085 - DNA, 497 bp, Cricetulus griseus
  misc_feature (26)..(44): n is a, c, g, or t
agtcacaagcatccatgaaagagatnnnnnnnnnnnnnnnnnnnggatgtgtgaaatttatcagtaagtgttaagtcacgagagagacttctcagcaaataaagctgcgatctatccatttgatgtgaagaggcaaactaaagtgtttaacttggtagacagaacaaacacctgccatacactcagaccttgggttccatccctagcaccccaaaacaaaatcaatatcttggcaacatttagcttctcctgaagtgagttattgccaatggaatgctttggaaatctccattatgttcataggaatgtgccccacacactgacaggagtgtgcaaattagcaacgcttacacagaaagcctgtgaagacactggtctgactcctacgacatgtccctgacccacaaataaaaggcgggaggaggtgctaatagattctttcaaccacttataaatctcctcaaaactatttctagtcaatcattaaaggcattttg

SEQ ID NO: 2086 - DNA, 374 bp, Cricetulus griseus
gggctctgcctctggctttagctctggctctggcacggactcccggtctgggtctggtaacctagtgacccgacacgatttttcgactctccggtggggtcctgcctgcgtcccggcagctgttttggagcgcttcaaagaagggagggcgttcgagtgcgtggggtcgggtctgtgaagccaccgcctcctcccagcgatccagtccgtggccggcctcttccatgcagttgaaataagttgacaaccattagcccgggttgcaactgcaggtggcactggaaactgactggttcctggacatgcccagtagaaggaggggtcctagtcggcagcagctaagccgttcagctttaccttctatgcagactttg

SEQ ID NO: 2087 - DNA, 408 bp, Cricetulus griseus
gctcctggcactagccataatatgagttaggtttaccttagcatgaaacaaatmgagcycctttgygacctcwctgaargagaatmtgaactagtatytggatttaacgyasagtatgctgsaggcccattmgcrctattcttyatagctgaatatactaacatkaktctaataaatgccctatcaactattgtattcttaggsccrtacaakaatmtcaacacatccagaaatatwkactactaatkttatrcttawgacrctaatattaacctccctattcctatgaattcgagcatcctacccacgcactccgatgtgatcaactcatacacttactatgaaaaaactaactcccattaactttagccctatgtacgtgatatatttctatacctgaattcatag

SEQ ID NO: 2088 - DNA, 245 bp, Cricetulus griseus
tacttagaaacttctttttccatctcagacrgaayctatggatctacattctttatagcaacargttttcacggtctccatgtaatcattggaacatcattccttacagtatgcttattacgacaatttaaatttcactttacatcaaaacaccatttcggatttgaagccgcagcatggkactgacactttgtagatgttgtatgacttttcctttacgtatcaatctattgatgaggctcata

SEQ ID NO: 2089 - DNA, 563 bp, Cricetulus griseus
cgcttcaagactaccgcaagaagctgctagagcacaaggagattgacggccgtcttaaggagctaagggaacagttaaaagaacttaccaagcagtatgaaaagtctgaaaatgatctgaaggcactacaaagtgkkgggcagattgtgggtgaagtgcttaaacagttaaccgaagagaaattcattgttaaagcaacaaatggaccaagatatgtagtaggttgtcgtcgtcagcttgataaaagtaagctgaagccaggaacaagagttgctttggatatgactacactaactataatgaggtatttgccaagagaggtggatcctttggtttacaacatgtctcatgaggaccctggaaatgtttcttattctgagattggagggttgtcagakcagattcgggagttacgagaggtaatagaattacctcttacaaacccagaattattccagcgtgtargaataatacctccaaaargctgtttgctgtatggaccaccaggcactgdgaaaacactyttggcacgagctgttgctagtcagctggactgcaacttc

SEQ ID NO: 2090 - DNA, 579 bp, Cricetulus griseus
  misc_feature (435)..(449): n is a, c, g, or t
cagttaagcctggatatcaataagttacccggggagaagctaggtcgagttgtacatatcatccaagccagggagccctctttacgtgattcaaacccagaagaaattgagattgactttgaaacactcaagccatccacacttagggagcttgagcgatacgttttatcctgccttcgaaagaaaccccggaagccctacaccattaagaaacctgtggggaagacaaaggaggagctagccctggagaagaagcgggaactagaaaagcggttgcaagacgtcagtggacagcttaactccaccaaaaaacctcccaagaaagcgaacgagaaaacagagacgtcgtctacgcagcaagtggcagtgtctcggctcatcgcttccagctccagctcagattccagctcctcgtcctcgtcttcatcttcttcnnnnnnnnnnnnnnnggactcgggctaaggggccaggccagatgggaaaggaaggctcggcaggaccggacccctgtaccacccttccccaccacttccccttgctgtgacacttctgcatctcatccctccataggagagctgg

SEQ ID NO: 2091 - DNA, 546 bp, Cricetulus griseus
ttctcggtcaccatgtggtcgtccgatgaaaaaaaagatattgaccatgaaacagtggttgaagagcakatcattggagagaactcacctcctgattattctgaatatatgacaggcaagaaactccctcctggagggattcctggcattgacctctcasaccctaagcaactggcagaatttgctagaatgaagccaaggaaaattaaagaagatgatgctccaagaacaatagcttgccctcataaaggctgcacaaagatgttcagggataactctgctatgagaaagcacctgcacacccacggccccagagtccacgtctgtgcagagtgtggcaaagcgttcgttgagagctcaaagctaaaacgacaccagctggttcatactggagagaagccctttcagtgcacattcgaaggctgtgggaagcgcttttcactggacttcaatctgcgcacgcacgtgcgcatccatacgggagacaggccctatgtgtgccccttcgacggctgtaacaagaagtttgctcactcaactaacctg

SEQ ID NO: 2092 - DNA, 588 bp, Cricetulus griseus
cgggtcggtgtagctctccgcgcctgctgctgtgtctgtcgctctcgggtggcgtgttccgcgtttcctgtccgcaccggtgcaccggtgcagctccggcctcgggcccgaccgccacaccatggcttccgctttggaggagttgcagaaggacctagaagaggtsaaagtgttgctggaaaagtccactaggaaaagagttcgtgatactcttacaagtgaaaaatccaagattgagatagaaataaagaacaagatgcagcagaaatcacagaagaaatcagaacttgacaatgaaaagccagctgctgtggttgctcctcttacgacaggatacactgtgaaaatcagtaattatggatgggatcaatcagataagtttgtgaaaatctacattaccttaactggagttcatcaggttcccactgaaaatgtgcaggtacacttcactgagaggtcatttgatcttttggtaaaaaatctcaatggcaagaattactccatgattgtgaacaatcttttgaaacccatctctgtggaaagcagttcaaaaaaagtcaagactgatacagttatcatcttatgtag

SEQ ID NO: 2093 - DNA, 467 bp, Cricetulus griseus
gcagcttcggcgtccgcggtttagtcgccaacatgcagctctttgtgcgcgcccagggtactacacacactcgaggtgaccggccaagagacggtcgctcagatcaaagctcatgtggcctcactggaaggcatttccccggaagatcaagtcgtgcttttggctggctcgccgctggaggatgaggccaccctaggccagtgtggcgtagaggccctgactactctggaagtagctggtcgcatgttgggaggtaaagttcatggttccctagctcgtgctggaaaagtgagaggtcaaactcccaaggtggccaaacaagagaaaaaaaagaagaagacaggtcgggccaagcggcggatgcagtataacccgtcgctttgttaacgtggtgccaacctttggcaagawkaarggccctaatgctaattcctaagtccttctgtgattcttgcactctaataaag

SEQ ID NO: 2094 - DNA, 1348 bp, Cricetulus griseus
  misc_feature (542)..(568): n is a, c, g, or t
acttcctggtgtcgatcgccggcctcctctacgctctggtgcagcttggccagccatgtgactgcctccctccgcttcgagctgcagctgagcagcttcgacagaaggacctgaggatttcccagttgcaagctgatctccgtcgaccaccccctgtcccagcccagccccctgagcccgaggctctgcccactatctatgtcattacccccacctatgccaggctggtacagaaggcagagctggttcggctgtcccagaccctgagcctggtgccccgtctacactggctgctggtggaggacgctgagagccctaccccgctggtctcggggctgctggctgcctctggtctcctcttcacacacctggctgtcctaacccccaaggctcagcggcttakggaaggcgagccargatgggttcggccccgaggagtakaacagcgcaacaaggccctggactggctccgakgcaaagggggtgctgttggcggkgagaaagacccaccaccaccagggacccaggragtggtgtatttnnnnnnnnnnnnnnnnnnnnnnnnnnnggagctctttaaggagatgcgttggactcgtggtgtctcagtgtggcctgtggggctggtgggcggcctgcgatttgagggtcctcgggtacaggatggccgggttgtgggtttccacacagcatgggaacccaacaggccctttcccctggacatggcgggatttgctgttgccctgcccttgctgttggctaagcccaatgcccagtttgatgcaactgcaccccggggccacttggagagtagtctcctgagccatcttgtggatcccaaggacctagagccacgggctgccaactgtactcaggtactagtgtggcacacacggacagagaaacctaagatgaagcaggaggagcagctgcagcggcagggccagggctcagacccagccattgaggtgtgatggcagcctcaccctgacttctaccttattttaggcacataccttgtgggactgggctccaggccagtccaggatgtggttttttaaaaagacctgacccctcagaaccagaggcagcccctccaaccacagggtgtggcccagctgcttccctcccttcccccagcctgccatgtggcactgcccacaggctggggacaagcagttgttgtattgagccaggtcagccccatctggggtggagcaggacagatggactcaggagggagggtggctgagggaactgggtaacttattggggacaagcatgcactggggggctagaggagctgggctggaccctccccacctgagcatgcggatcctcttcctac

SEQ ID NO: 2095 - DNA, 1318 bp, Cricetulus griseus
gcacttgttttcttccttctgagattcccccaaaatagttgcttcaatccgactgccacgagtcctgctgacgccttgagattcttttgggagcaggtccctgacccacgttcatctccgagccggatcactactccgcaagcctgagggaggaggcggaccttcgcgaacagagggcccctcctcggaggggagggaccgacacccagggccttgttctccagcagttgcagcgccgggtcccaggacttagtcctgcgccacggttctgaccacgggtggcccgctgcccagccggctctgcaagccggtggtccgcgtgtssmtccgatatgtcgtcctgcagccgcgtggcgctggtgaccggggctaacaagggcatcggctttgccatcacgcgtgagctgtgtcgcaagttctcgggggacgtggtgctcaccgcgcgggacgaggagcggggcaaggcggctgtgcagcagctgcaggcagagggcctgagcccccgcttccaccagctggacatcgacgacctgcagagcatccgcgccctgcgcgactttctgcgcaaggagtatgggggacttaacgtgcttgtcaacaacgcgggcatcgcctttagaatggatgatccaacaccctttgacattcaagctgagatgacactgaagacgaacttttttgccactagaaatgtctgcaatgagttactacccataatgaaaccacatgggagagtggtgaatgtcagcagtctgcagggctcaaaggctcttgaaaactgcagtgaagatcttcaggaaaggttccgatgtaacacacttacagagggggacctggtcgacctcatgaaaaagtttgtggaggacacaaaaaatgaagtccacgagagggaaggttggccagactcagcttacggggtgtccaagctgggggtgacagtcctttccagaatcctggcccagcagctgggtgagaagcgtaaagcagacaggattctgctcaatgcttgctgcccagggtgggtgaagaccgacatggcgagggaccagggctccaggactgtggaggaaggggcggaaaccccagtttacttggccctcctgcctccagatgccactgagcctcagggccagctagtctgtgacaaagtcgtgcaaacatggtgaacatctgctttgggacttaatggtttagtaactgytsgagagggakmcaaatggaggctgctgtagtttgattctctttgcacattgagaaggaaggtccgtcatacctgtgaggttctacaatctgaatctgaatgatgtgcaatgtccaa

SEQ ID NO: 2096 - DNA, 580 bp, Cricetulus griseus
gcgtcagaagtacgagcggatcagtgagaagaagatgtcaacgcccattgaggtcctctgcaaaggctacccctccgagttctcaacatacctcaacttctgccgctccctgcggttcgatgacaagcccgactactcctacctgcgccagctcttccgcaacctctttcaccggcagggtttctcctacgactacgtcttcgactggaacatgctcaaattcggtgcagcccggaatcccgaggacgtagaccgggagcgacgagaacacgaacgggaagagaggatggggcagttgcgggggtccgcgaccagagccctgccccctggcccacccacaggggctactgccaatcgactccgcagtgcagccgagcctgtggcttccacgcctgcctctcgaatccagcaagctggcaatacttctcccagagcgatctcacgggccgaccgggagaggaaggtgagcatgcgactccacagaggcgcacctgccaacgtctcctcctcagacctcactgggcggcaagaggtctcccggatttcagcctcacagacaagcgtgccatttgaccatctc

SEQ ID NO: 2097 - DNA, 1343 bp, Cricetulus griseus
caacagtgacctgtcaggggagctggggggctgcaattcagaaagtggagtgcaggccagaggggaggttgagaatagcaagagtaaggaggattgcaccatgtcatgaggaggcagaggcagcaggcagacggggcgaccgagtttcagagagggccaaggactcaacacactaagcccaaccttaagaattctacccttcaactctactgcccaggttcacgaaatgttccagtttctgtgaacgtaccacgtgtcaatcaagtatcaacgactttaagttatagactgttacttgtagatttgtattcaaccattggtcatgtagacaccattgttttcagtttcagttctagctgagagcattccattagcatcaggtgacaccatgtcctgtcatgtctgcattccagtcttaagggcaaaacgtaaccatttgcttcaggccgggatgaatgttgactgtacttgaccaaatgtatcagcatctagttgaagtgaccaaacagcatgcttagatttctgtgtcttgagcagtgaatagtcaaactaccatgtctcattaaagtagatgtatcttcatgtttgatcttaatgtgtacgtcataacctgtgtggtattgtatttaaaggagttagatggataagtagcaggtaggtcactgggtgagaggaccagcacctcagggtagagattaattactgtagggattcaaacagttatcaaataacacagggagactacgtgcctttctttacctcgcctaagtgctgaattttgcaccaatgctcttggatcttattgccaatggtacccaaattaattttatccaagatctttatttcacttcacatgggtaatatgataaattcattttatacaaatattttatttttatccttttctgttaatgacaagttgaaattatatttcctactttagtgtttaggagaaagtcattaatttttttaactttaaagttatcttcctgtctgaatgtctacttattattaaaaaaaaaaacagtacaacacattgtttgttcttatgcaaaggactcattagacttgaatccaacattttgtgtttggtataaatatttttatttgttgtttctcagtattttctttttggaaagttattttacctgcctgaaggaaataatgtattttctatataaagaagcagttagaaaaaattatcataaagttgcattgaaaagtaattgcaaggccatgtactgtatgactactgttgacatgttacgggatcatgtgaattcatactactgctacaaggtagagtggaacgcaaaaagaccaaaccctcagtaaaatttgag

SEQ ID NO: 2098 - DNA, 564 bp, Cricetulus griseus
  misc_feature (435)..(452): n is a, c, g, or t
ttaaagatgcatttgagcgaaacccagaacttcagaacctgctgctagatgacttctttaagtcagcagttgacaactgccaggactcctggcggcgggtggtcagcactggggtgcaagcaggcattcccatgccctgcttcactactgccctctccttctatgatgggtacagacacgaggtgctaccagccaacctcatccaggctcagcgggattactttggggctcatacctatgaactcttagccaaaccaggagagtttatccataccaactggacaggccacggtggcagcgtgtcatcctcttcatacaacgcctagtaggactgtgtcgtcaccctccctcccaccaacaggacagtccctgtggtatgcagcactcctctttgtcctagttcctgctcagatcttttagccaagtgtcggcttnnnnnnnnnnnnnnnnnnctgaagtcttgtcccatagttctgaaccaccatgtgccccgcctcaaccttttgcactgcccaggaacttatctcgtgcagcactgcgtgactgctccctgactgagctgtg

SEQ ID NO: 2099 - DNA, 559 bp, Cricetulus griseus
  misc_feature (169)..(186): n is a, c, g, or t
tgggctccgatgagatcaaaaaaggaagtgcaggaagttactgcctcctacaatggagttgacggatgcttgagctccacattggagcatcaggtaacttcacacaaccagtcctcaaataaaaacaagaaagtcgaggtgattgacctaaccatagacagttcatcannnnnnnnnnnnnnnnnnccctctgccaagaggacctgtccttccctgtctcctacatcaccactaaataataaaggtattttaagtcttcctcatcaagcatcgcctgtgtcccgcacccccagccttcctgctgtagatacaagctacatcaacacttccctcatccaggactacaggcaccctttccatatgacacctatgccttatgacttacaaggattagatttctttcctttcttatcaggagacaatcagcattacaacacctccctgcttgctgctgcagcggcggcagtctcagatgaccaggacctcctgcactcctcccgctttttcccgtatacctcctcgcagatgtttctcgatcagctaagtgctggaggaagca

SEQ ID NO: 2100 - DNA, 568 bp, Cricetulus griseus
tcggcttcatcgtgggttcgcaaggcgccgagggcgcgctggaggaagttcccctggaggtgctgaggcagagggagtccaagtggctggacatgctcaacaactgggacaaatggatggccaagaagcacaagaagattcgtcttcgttgccagaagggcattccaccttctctgcggggacgggcctggcagtacctgtcaggaggcaaagtgaaacttcagcagaatcctggaaaatttgatgagctggacatgtctcctggggaccccaagtggctagatgtgattgaacgtgacctgcaccggcagttccctttccatgagatgtttgtgtcccgaggaggtcatggccagcaagacctgttccgtgtgctgaaagcctacacgctataccgccctgaggagggctactgccaggcccaggcacccattgctgctgtgctactcatgcacatgcctgcagagcaagccttctggtgtctggtacaagtctgtgagaagtacctgcctggctactatagtgagaaactggaggcaatccaactggatggcgagatcctcttctc

SEQ ID NO: 2101 - DNA, 527 bp, Cricetulus griseus
  misc_feature (322)..(336): n is a, c, g, or t
tgaaggaggccctcaacagcctctcgcagctctcctactccacaagttcatccaagaggcaggcccagcagctggaagcgctgcagcagcaggtcaaacagctacagaaccagctgtctgaatgtaagaagcaacaccaggaggtcatatcggtttatagaatgcatcttctgtatgccgttcagggccaaatggatgaagatgtccagaaagtcctgaagcaaatacttaccatgtgtaaaaaccagtcccagaagaagtaaaactaggattccttggcaggacactgcccctttgttgcctatttttgtgttagatctgnnnnnnnnnnnnnnnactaccattgttcttatccatggtgtgcactgtgacctagcatagcttcttttccagagttttctggggatgagtctcaagagatgatgccctcctcaaaactgcataggtacttcagaccagcagaggtgagggatccttgtcatctctttagaatctacaggatcagctatgccccaaagcctagtcta

SEQ ID NO: 2102 - DNA, 407 bp, Cricetulus griseus
gagaatggcaccagcctgactgatgaggagctggtgaccatgtcggttcgagagctgaaccagcacctgagaggcctgtccaaggaagagatcatccagctgaagcagcgccggcgcacacttaagaaccgcggctacgcagccagctgcagagtgaagcgtgtgacccataaggaggagctggagaagcagaaggcggagctgcagcaggaagtggagaagctggcctccgaaaacgccagcatgaagctggagtttgacgccctgcgctccaagtatgaggccctgcagaactttgccaggaccgtggcccgcagccctgtggccccagctcggggtccccttgctgctggcctggggcctttggtccctggcaaggtggctgccaccagcgtcattacaatagt

SEQ ID NO: 2103 - DNA, 545 bp, Cricetulus griseus
taagctaatgtctggggtccacaaacacatattcacacgtgccctcaccactttccaacagaagctgcgactggagcaaggaatcagtctggactgcacacctcatcaggaggcgctgtttctcattttccttcattgtataaatgaagtctacattttgagctggactttttaattaatacatgtctcgttaaagatccaacaagacatctctcctttcttgcctttcagaactttgaaattcaagcaccacaggcctctatgttctgtgtaatacatccaagaccctcatataccacttcagatagcagatttgctcagcggggaacgtgcatacaattaacttattaacaataatgaaatgctgtaatcttgtgcatgctcatattagaatctgaagcccatgagtacattccaagtgatgatcacggcagtatccacacattatgttgatattatatatgcagcttatgtgacaccaaaatcacctatcgattatacaaaattaattcaatttgttgtttgtgtcatatgttctctctcac

SEQ ID NO: 2104 - DNA, 522 bp, Cricetulus griseus
  misc_feature (241)..(267): n is a, c, g, or t
  misc_feature (352)..(370): n is a, c, g, or t
ctctggcagagagtgaccgcgcagcagagggcctaggggttgcgattgaagaggaggggcacgacggagtccgcattgggggaagttccccactcttgagtcatcccagcccagtgtggatgaactattcctacagcagcctgtgtctgagcagtgaggagtcagagagcagcggggaggatgaggagttctgggctgagctgcagaatcttcggcagaagcacttatcggaagtggaggnnnnnnnnnnnnnnnnnnnnnnnnnnnttgaggacttgtacagccggcttgggaagcagcccccacctggtatcgtagccccagctgccatgttgtcctgccgccagcgccnnnnnnnnnnnnnnnnnnnccccacttcccggcgcaacagcctgcagcgctctgatctccctggccctggtgagatgacagccacccagctttcatctttcccttgagatttgttccctattggcaagatcttttcaggccctggtggtctacccagtctggggtactggc

SEQ ID NO: 2105 - DNA, 536 bp, Cricetulus griseus
  misc_feature (480)..(480): n is a, c, g, or t
ctgctatcagtttgggacaattgtagagcctatggtcgtgtgaattattgtcttatacagcttgatgttactctgtccctgttcttagctatagcacccatttcctggtgcctgaggtccctgccatcagaaagtgatttgggtgagaattctgtcacttgtgcgcattaaagtgacacctaataaaacaaggatgtcctgcttttgttcagacactcgatatgaatgaagctttgcatcctagttggtcattgagccaacatcctcggtacctgatagtgacacaaaatagatgttggtgcctaaacggaattctcagtgcctgttgagacaggcgaatgtccgtaggtaaatccacggctgaaaggaccagttaaagtacacccactcatagtatcacaggatacccagaagcctctagtataacccagtactcttttcatcctcagatactctgaagagttagagttcgatacccanacttcatatttcctacgctctgaaatttgttttgatggatgcaacagggccacctt

SEQ ID NO: 2106 - DNA, 119 bp, Cricetulus griseus
tgcggttcgccgcttcataacctggtgccagagtaattggtggttaaaagaagtcacaagtaacttggatgaagtaggaatttcaactaaggagatactgaggattttctgccgattct

SEQ ID NO: 2107 - DNA, 554 bp, Cricetulus griseus
  misc_feature (333)..(351): n is a, c, g, or t
  misc_feature (481)..(497): n is a, c, g, or t
atcctcatggagaagattgaacctgagccttttgggaattgcctgctacggcctggcagccctgcccgagtggtccagtgtatctcagaactgggtatttttggagtctatgtcagacagggaacaacacttgtgatgaacaagcatgtggggcatctgcttcggaccaaagccactgaacatgcagatggaggtgtggccgcaagagtggcagtcctggacaacccctaccctgtatgagggcacatcctgcacttcactcaagagaccttctatcccctgtacttgacattcctctcctaattcctgagggctacccctgtctccaccttnnnnnnnnnnnnnnnnnnnatagacctccagggtcttcaaggaagggaaaatcctgggtaccttctctcagccttccatctgaggaccagaagagttatgcttccattagaagagttctggagatccccagatcttggagtgtggggannnnnnnnnnnnnnnnntaaaggccataagccctgcagatcttattaccctcttgtgagcctttccagcaggtt

SEQ ID NO: 2108 - DNA, 398 bp, Cricetulus griseus
  misc_feature (96)..(122): n is a, c, g, or t
  misc_feature (163)..(186): n is a, c, g, or t
aaatggtacgtcacctattataggaagaatggggaaattgccacgatcatactctaataatcgggtttcttattagctcattgagtctatatatgnnnnnnnnnnnnnnnnnnnnnnnnnnnacctctgcaagtacaatagatgctcaagaagtagaaaccannnnnnnnnnnnnnnnnnnnnnnnttgcttattggaatggggcttccatctctacgaattgtatatataataggtgaagtcagtaacccaattatgacaggtaaaactatggggccatcaatgatactgggggtatgagtacacagactacgaagacctatgcgtgggctgatatatgattccaaccaatgaccttaaaccgggaggtgtacgatgactcgaagtggagaatcgga

SEQ ID NO: 2109 - DNA, 513 bp, Cricetulus griseus
aagtgagtcattatccaggtatacagttctgcttctatgttgatggccatcatcgtcctttcctcaagacctttaaactcttcttcaaaacttgagtctttatctggctgctaatttattgaagtgtttatttgcccataccacttagttaatataaatggcagccaagctatgtctatagctgatgacattctcccttgctgttgktttcattgtatggatttttttgtcacgtcaatatactgtttatttaggaaagaagaaaataggktgctgagagaaataatttarggactgcctgccttccatttgccttgtctttccagattgttttakccttgggaggattctaggaaactgttcccaatagattttgatctctgatttcatatctttggtttcataaagttacatatgatagaaatttgagtgaaaagcagcgaagagtgaaactgtgggcaaacagtaattttgtaagatacaaagcaagcaggcagacctttatgatgagtg

SEQ ID NO: 2110 - DNA, 536 bp, Cricetulus griseus
cggagctgagcatttcagatctgcttagtgaaccggtgtatcacccaccatgctggctgcaaggctcctgtgtctccggacactgccttccagggttttccagcccactttcaccaaggcctccccacttgtgaagaattccatcacgaagaatcaatggctcttaacacccagcagggaatatactaccaagacaagagttaggattcaccgtgggaaaactggccaaggactgaaagaggcagcttttgaaccatcagtggaaaaaatctttaaaattgatcasatgggaaggtggtttgttgctggaggagcagctgttggtcttggagctctgtgctattatggcttgggaatgtctaatgagatcggagctatcgaaaaggctgtaatttggcctcagtatgtgagggatagaattcattctacttacatgtacttatcagggagtattggtttaacagctttgtctgcmttggcattagccagaacacctgctgtaatgaacttcatgatgaaaggctcttggatgacca

SEQ ID NO: 2111 - DNA, 178 bp, Cricetulus griseus
tgaaatgcaactctgactattgtacagttaattcctcactgaggactccaaacattcctgtgtttcacgtgtactgaagaacactgttgtgtgatgcttggtgtaaagttattgtgaaaattttattgtctttatttttaccaaagatttcccatagttcgaagcatttgaagcaata

SEQ ID NO: 2112 - DNA, 680 bp, Cricetulus griseus
agtgcatttctctgcccttgacagcctttcgcgtcagcatggctgctctggcggctctgcgcggcggcgtccgccggcctctgcttcgagggctgctgcaggaagtaagatgcctggatcgaagttatgcatccaaacccactttgaatgaagtagttatagtaagtggtgtaagaactcccattggatccttcatgggcagccttgcctctcagccagccactaagcttggatctattgcaattcaaggagccattgaaaaggcagggatcccaaaagaagaagtaaaggaagtctacatggggaatgtcatccaagggggtgaaggacaggcccctacacggcaagcagcattgggtgcaggtttaccaatttccactccgtgtaccacggtaaacaaagtttgtgcttcaggaatgaaagccatcatgatggcttctcaaaatctcatgtgtggacatcasgatgtgatggtggcaggtgggatggagagcatgtcaaacgtcccgtatgtaatgagcagaggagcaacaccgtrtggtgggataaaacttgaagacctgattgtaaaagatgggctgactgatgtctacaataaaattcatatgggtaactgtgctgagaatactgcaaagaagctgagtattgcccgaggtgagcaggacacttatgccatcagc

SEQ ID NO: 2113 - DNA, 529 bp, Cricetulus griseus
agaacgagaggggtcgaagacgagatagagattatgataaagaaagaggcagtgatcgagaaagggacagggagagatcaagagagcggtccaaggagcagcgaagtagaggtgagggagaggaaaaaaagcacaaagaagacaaggaggataggcgacacagagacgacaaaaaagaattcaagaaaaaacacagcagaagtagaagcagagaaaggaaacacagaagtagaagcagaagcaaaaatgcagggaagcggagcaggagcaggagcaaagacaagtcaagcaaacataaaaatgaaagcaaagaaaagtcaaacaaaagaagtagaagtggcagtcaaggaagaactggcagtgttgaaaaattgaggaaacgagaacacagccctagcaaagagaagtctagaaagcgcagcagaagccaagaccgctcccacaagagagatcatggggatggcaaggaccagtcagacagacaggatcatcagagaagccagagtgtagagccagagagccaagaaaa

SEQ ID NO: 2114 - DNA, 598 bp, Cricetulus griseus
tccacaatacaaaacaggtgacaagaggttttgctggtggtgttcaracagtaactttaattccaggagatggaattggcccagaaatctccgcctcagttatgaagatttttgatgctgccaaagcccctattcaatgggaggagcgtaatgtcactgccattcaaggaccaggaggaaagtggatgatccctccagaagccaaagagtccatggataagaacaagatgggcttgaaaggcccactaaagaccccaatagcagctggccatccatctatgaatctgttgctccgtaagacatttgacctttatgccaatgtccggccatgtgtctcaattgaaggttataaaaccccttacacggatgtaaatattgtcaccatccgagagaacacggaaggagaatrcagtggaattgagcatgtgatcgytgatggagttgtgcakakcatcaagctcatcaccsaacaagcgagcaakcgcattgctgaktttgccttcsagtacgctaggaacaaccaccggakcaacgtcacagcggwgcacaaagccaacatcatgcggtatgtcagatgggctttttctgcataaaatgc

SEQ ID NO: 2115 - DNA, 561 bp, Cricetulus griseus
ttgactctcaagtgccaaagtactctgtgaaagggatagctgggagcaccggtggcctctcaagctacacacaaagaattttggagcagagggaaaatacagactttgggcttgctatattgcaagactcagatgcgttgtggcctcacaaacacaaccaggcacagaaaaaagaagagacgagctctggtccagagaatgtccagacccaaaatccacgttatagcagagaggaactgaattcaatgactcttgatgaagtagaacaactgaatacaaagctccaacagcaaatccaggaagtgtttgaagagttaacacaccaagtccaagagaaagactctttggcgtctgagctccatgtccgccatgttgctatcgagcagctcctcaagaactattccaagttaccatgcctgcaagtgggacgggcaggaccgaggtcacacctgcccataaacaactgaactgaacgtagcgtctgacttttaccctctgttagtctgccaagcatgtgtacctcgaacacatttgaagaaagttatagtccattcttacagt

SEQ ID NO: 2116 - DNA, 245 bp, Cricetulus griseus
gtcaaatattctttctaatagtatacttgtttcaagcaggatacagtataatcaaatacaagcaagaatttcccagagttatatgattttactgataattggaaatatatctcacttcattttctgattttcatttctcttttttcttctagaatgtcttgattgttgaggtaagtgctgcatttatttctaaaatactgttaaattttctcagcttagtgtatactataggtaagccagggaaa

SEQ ID NO: 2117 - DNA, 1185 bp, Cricetulus griseus
  misc_feature (478)..(514): n is a, c, g, or t
ctgaggaggccttcgcggccgacttgggacggtcccccgaacctgagcgtctctccagggggccgcacggaggcgtcggggagccgagacgccctggggctccgagccacgccgggtgacgcagttccgcttccggcgccgggcgcagacctgtcatggcctccccgggggcgagtcgcggcgcctccgccgccaccgccgccgccgcgtctccccggccgccgcagggccgctcctcgcgacgggacaagtactcggttctgctgcccacctacaacgagcgcgagaacctgccgctcatcgtgtggctgctggtgaagagcttctccgagagttcaatcaactatgaaattataatcatagatgatggaagcccagatgggacaagagaagttgccgaacaactggaaaagatctatgggccagacagaattctcctaagaccacgggagaaaaagctcggccttggaactgcctnnnnnnnnnnnnnnnnnnnnnnnnnnnnnnnnnnnnncatcattatggatgctgatctctcacaccatcccaaatttattcctgaatttatcaggaaacaaaaggagggtaattttgacattgtctctggaactcgctacaaaggaaatgggggtgtttatggctgggatttgaaaagaaagataatcagccgtggggccaattttataactcagattttgctgagaccaggagcgtcggacttaacaggaagcttcagattataccgaaaagaagttctgcaaaaattaatagaaaaatgtgtctccaaaggctatgtctttcagatggagatgattgttcgagcaagacagttgaattacaccattggtgaggttccaatatcatttgtggatcgagtttatggtgaatccaagttgggaggaaatgaaatagtctctttcctgaaaggattattgactctctttgctactacataaaagaaattactcatttatacttaccatgttcatttcaattaaaagtaagagaagcctgggtcactgatttttgtcaatgctctcttgatacatgagccaaaggtaaggtgcatttcatactggtcatttctctggagaaactccattttatatttcaaactaaaatttaaagttaggtttaataagcaatgttctcgatttttatgtacattgtgctgtattaagacct

SEQ ID NO: 2118 - DNA, 556 bp, Cricetulus griseus
ttcctaatgagaaggtgggctggcttgttgagtggcaagactataaccctgtggaatacactgcagtctccgtcctggctggcccccaatgggcggatcctcagatcagtgaaagcaacttttctcccaaattcaatgaaaaggacgggcatgtggagagaaagagccagaatggactgtacgagattgaaaatggaaggcccataaatcctgcagggaggacaggactggttggccggggtcttttggggagatggggcccaaaccatgctgcagatcccattataaccaggtggaaaagggatgacagcgggaataaaatcacacaccctgtttccgggaaatgcatcttacagtttgttgcaataaaaaggaaagactgtggagagtgggcaatcccaggggggatggtggaccctggggagaagatcagcgccactctcaagagggagtttggagaggaagccctgaactccttacagaagtccagtgctgagaagagggagatcgagaagaagctgcatgcactcttcagccaagagcatcttgagatata

SEQ ID NO: 2119 - DNA, 162 bp, Cricetulus griseus
gagaagcgccccaggacatcaagatggcaatttatacatatggtcagctgattccttctttaggggatgcaaaattcagaccaatgatctgccgaaatcattgaaaaacagcttgaatattataaaaaaccgtaagagacacagcaatagctgattcaccaa

SEQ ID NO: 2120 - DNA, 439 bp, Cricetulus griseus
tgaatctgatactgcctcagttaatgaaaatgggctagtcacagttgcagattatatttctagagctgagtctcagagcagacaaagaaacctcccaagggaaactttggctaaaaacaagaaagaaatggcaaaagatgtgattgaagagcatggtccttcagaaaaggcaataaatggtccaactagcgcttctggcgatgaaattcctaacgtaccgcgtactccaggagaagaaaagactaagaacttaaaagaagaaagcactcaagaagcagcagtcctgaatggtgtttcataactgaaggaagttcctagtttacagttcttttacattacagttacaatagtgcttgtacaagcttgccaaagatagaatatggatcgccagtctttacatcgcactttcagttcctccatttggaattcagaaagggga

SEQ ID NO: 2121 - DNA, 505 bp, Cricetulus griseus
ctgggcttcactttaatttggaagaatgtgcctaagacacagatgaagttcagcgtacagacaatgtgccccatcgaaggagaagggaacattgcacgattcttgttctctctgtttggccagaaacacagcgctgtcaatttaaccctcattgacagctgggtggatattgccatgtttcagctgaaagaagggagcagtaaagagagagcagctgttttccgctctatgaactctgctctggggaagagcccatggctggttgggaacgagctcaccgtggcagatgtggtgctgtggtccgtgctacagcaaactggggatggcagtggggtagcacccgccaatgtgcagaggtggctgaagtcctgtgagaaccttgtccccttcagtactgccctccagctccttaagtaagttctagcagcttgtcttacagggttcaacataagaatgatacagcttcaagtttgttgtcaggaaagggacttgtcctagaatcaca

SEQ ID NO: 2122 - DNA, 470 bp, Cricetulus griseus
  misc_feature (39)..(64): n is a, c, g, or t
  misc_feature (66)..(79): n is a, c, g, or t
  misc_feature (84)..(121): n is a, c, g, or t
  misc_feature (171)..(190): n is a, c, g, or t
aagcttctcaacgaggcggccgagcggcagacgctaacnnnnnnnnnnnnnnnnnnnnnnnnnngnnnnnnnnnnnnnntcttnnnnnnnnnnnnnnnnnnnnnnnnnnnnnnnnnnnnnncaagatccaagataaggaaggcattccacctgaccaacagagrctgatannnnnnnnnnnnnnnnnnnnggatggccgcaccctgtcagactacaacatccagaaagagtccaccttgcacctggtgcttcgccttcgtggtggcatcatcgagccatcccttcgtcagcttgcccagaagtacaactgtgacaagatgatctgccgcaagtgctacgcacgcctgcacccccgtgcggtcaactgtcgcaagaagaagtgtggccacaccaacaacctgcgccccaagaagaaggtcaaataaagctttggccataccaggcccatgaccctgggaccaaataaagtc

SEQ ID NO: 2123 - DNA, 292 bp, Cricetulus griseus
tcatgagatacctctaagctacagtcatgtgcctgaagtttctcttctgaccacaggtaccttctggatcccactacgtggtccaagtgccatgagcctaagaatattgtggagtggaatgtgacgctattttctaccctcttggcgtttggtggacttgaattcatcttgtgtcttattcaagtcataaatggagtgcttgaaggcatgtgtagctattgctgctcccaccaacaggtgagaatttgtgtgacaacgttgaggtctagccccgtagtgttcagttgccaca

SEQ ID NO: 2124 - DNA, 253 bp, Cricetulus griseus
ccggttcaggtctctccgctgatcaagctcggccgatactcagccctggtcctcggcatggcctacggcgctaaacgctacagttacctaaaaccccgggcagaagaggagaggagggtggcagcggaggaaaagaagagactagatgagctgaaacggatcgagagagaactggcagaaggtgacaccatactcaagtgatgcagagcccatgagcttgcctgtccttagccgctgaggatgaataaagctt

SEQ ID NO: 2125 - DNA, 1262 bp, Cricetulus griseus
cagccacgagattgggtgtgaataaaaataattcttgtccttttatttaacacttgtgatgagaagtcagctgtcctttgctgatactcggtgatctagattctcctctgtgtccctaattcttggtagtcaagaaaaattccattttgcgacaattttgtcagatgctgatagaccagcttcatcacatgtgaggttgtctgaaatggaaagctctgtagaaagggtgtgtcttttctgtttcagttgtgagcactaggtcagctgtgcggctggaaacgtcaagaatgcagatcttgcactgaggagctggacattgctcattagttctcccattgggttagtatatgcttctacgtggtaaaatcacattaccactggacagacaaacagccagtgtctgtcattgccctcagtggtccctcatcctgtgaagattaatattaggaactgagggaggggactgtggctctcagtgagatctgctcacgagccacatgtgagaagacactgaagggtggctctccatgtcattccatatgacagtgctcttcatcctggatcaaaggctttattactgtagcctgattcgaaggaactctgccctgtgaggacctatcattcctcatctgttaggctctacacccccaagccatggtcccaccattgaaggtgcctgtgactcctttccacctatttattgctatggacagtgacagagattaagtgcttttctaggttagccatttcttagcatctgaatttgataatttgtcttactgagctaacagatattttaaagacatccagcgtttttgctcaccgagagagatggctgctagtccccgctggcacatcctctggcaccacaggcaatgagagggtgttagggtggagctcttcaccacctcatggtgtggggatggtgcgctgggcggacttgatacacttaatgctcatggatagactgacatcggtctgggactgactgagaggtttgtcttctggtgttgaagtgttagtacattctgggtatgaaaggcattcgatatatttttcttaattatggggtttatttttctaaatatgggttaatcagcttgttgactgggcatgcccttaaaaggaatttaaatttcccactgtggaccttaaagaatcagggaattttgtttgttaaattctctttgggagaacagaacttctcttccctgaccactttattatctttgatttttttcaaagggcctcgattggtggtt

SEQ ID NO: 2126 - DNA, 508 bp, Cricetulus griseus
atgtcaacaagtggagagatttcacgtatcaatgttcctcctgaatcacttgttctgaatatgctggtgcatgtctcagtgactcaacaaaaagtactatcacagctgaaaacctctccgtctgttcctctcttctagtgagcactgcttcagggcttcatttgactatctcttgtgagttcacatatgggtatctttgtttaatagacatgcacacgcattgtaagttctatcttaaatgaaaactgcttttatgtggaaatgctcagccctcatgagaattgcctttgcacacgtgatctgaaccgtggagcctatcctcacgtagactgcttgagtgtggccatacaacattaaatctggtttctcgttgacaaaataaaaatcaaacaaggaaatgtactgcatgatagatttatttgctttatttggtgttaaaagtcttgttataactttacaattctgtggtatgactttataccaagaataggaacctgccacctatatt

SEQ ID NO: 2127 - DNA, 549 bp, Cricetulus griseus
attagatataccatagtgactgacattctaaaacatttgtcatgttctagctggcctgtgagagtttgcagagcctgagcacacccctgctttccttggagaatgcatgaggactgtggtgcctgtcattttactgtgtgacttttctcagacaagaaatagggccctgaaagattggtcaactttgtggctcacaggcaatggtggtccttattctttactggcaggtatgagagctgggcctcttaagtgtgctaaaaagggatatgttcttgatagacctgatttgtcttggatttgaacttttgctgtctttttttgtttataaattccaatgttttcttgccttggtaatacatgagcttaagacatgtagtccaatatcagaagtacaggtgttgttagcataatttatccatacctgaatggttctacatctagtcctttttgccaaaaaagaatgtatcatttaaattcatggggttagcatatctccagtgccgatgaacatttgaacatgtgcacagtaacacttggtttgttctgtgt

SEQ ID NO: 2128 - DNA, 518 bp, Cricetulus griseus
cgccgttcttcctggcgtgttatctccagcatcgaacagaaaacagagaggaatgagaagaagcaacagatgggcaaagagtaccgtgagaagatagaggctgagctgcaggacatctgcaatgacgtactggagctgttggacaaatatctcattcccaatgctacacagccagaaagcaaggtgttctacttgaaaatgaaaggagactattttaggtatctttctgaggttgcatctggagacaataaacaaaccactgtgtcaaactcccagcaggcttaccaagaagcctttgaaattagtaagaaagaaatgcagcctacacacccaattcgacttggcctggcgctgaatttctcagtcttctactatgagattctaaactctcctgaaaaggcctgcagcctggccaaaacggcatttgatgaagcaattgctgaactggatacgctcaatgaagagtcttacaaagacagcaccctgatcatgcagctactcagggataatctcacttt

SEQ ID NO: 2129 - DNA, 567 bp, Cricetulus griseus
tgctcttctacttccgggtacccttcatttatggccacaaatacgacttcacgtccagtcggcacacagtggtgcacctcgcttgcatctgccactcatcccactacgtcaagcgtctgctggagaccctcttcgtgcaccgcttgtgtcacggaaccatgcccttgcgaaacatcttcaaaaactgcacctactactggggctttgctgcatggatggcctattacatcaaccaccctctctacacaccccctacctacggagcccagcaggttaagttggcgctgaccatctttgtgatctgccagcttggcaacttctccatccacatggctcttcgggaccttcggccagctgggtccaaaaccaggaagatcccatatcccaccaagaaccccttcacctggctatttctgttggtgtcctgtcccaactacacttacgaggtggggtcctggattggctttgccatcatgacgcagtgtgttccagtggccctcttctccttggtgggcttcacccagatgaccatctgggccaagggcaagcaccgcagctacctgaagg

SEQ ID NO: 2130 - DNA, 550 bp, Cricetulus griseus
tttggcacagactatgaagactctaaggctaagaaagaacactgtgaaattttcattgtataggcattttataaatacactcatctttgctgtgctggcttctatagtgtttatggtgtgggcgacaaagaccttcaggattgcaaaatgccaatcagactggatggagctctgggttgatgatgcattttggagctttctcttttcactcatccttattgtgataatgttcttatggaggccatcagcgaataatcagaggtatgccttcatgcccttgatagatgattctgatgatgaagttgaggaattcatggtaacatctgaaaatttaactgaaggaataaaactaagagcttcaaaaacagtttcaaacggaacagctaaacctacttgtgataattttgatgaagatttgaagtgggtggaagaaaatattccctcttcattcacagacgtagctctccccgtcttagtggactcagatgaggaaattatgaccagatctgaaatagctgaaaagatgttctcttcagaaagataatgtgac

SEQ ID NO: 2131 - DNA, 528 bp, Cricetulus griseus
  misc_feature (496)..(496): n is a, c, g, or t
agtactttctgttccgagtggtagagaagactgtcaccaggggttgtggctttcacctgccagatcccaagacaccaggtctctacgcttccacctttcttaaccgtgccttggattgcttatctgttttatataaatagagtaaatattatagtatataattctaacaactcacattcaggccactgtaaaagcttaatttcaaactggttttcattgtttcagagagtaaatatttactatatgttactatatattacaacacaaaacttttacctagggccagcaagctgactcaatggataaaggtgcttgctaccccacctgacgacatgtgctccatccccagtccccatattggaaggagacatccaactcctgcaagttgtcctttgacctccacgtgtgcttagtgacacacacaagtgtgtactcgggcacacacgcacgcgctcgcgctctcactagtcctcattcacatatcacacacttcttntattataaattatgtctcctctcatgtggtga

SEQ ID NO: 2132 - DNA, 494 bp, Cricetulus griseus
atgggacgcgtgtgccaacatgaaagtgtggctctttgaaacaactcctcgattcaacggcaccatcgcctccttcaacatcaacaccaatgcctgggtagcccgttacatcttcaaacgcctcaagtttcttggaaataaagaactctcacaaggcctctccttactgttcttggccctctggcacggcctacactcaagatacctgatttgcttccagatggaattcctcattgttattgtggaaaagcaggtcaccagcctaatccaggagagccccaccctgagcagcctggcctccgtcactgccctgcagcccttctactacttggtgcagcagaccatccactggcttttcatgggttactccatgactgccttctgtctcttcacatgggacaaatggcttaaggtatacatgtctgtctacttccttggacatgtcttcttcttgagcctactattcatattgccttacattcacaaagcaatgg

SEQ ID NO: 2133 - DNA, 535 bp, Cricetulus griseus
gtgtacccgaaaccacagcatcttcctggcagatataaatcaagagaggtgtgtcaatgagacctacaagaagaacctgatggccctcaacaagtttgtgatggtgaaattccttaacgattccattgtggatcctgtagactctgagtggtttggattttacagaagtggccaagctaaggaaaccattcccctccaggagagcactctatacacagaggaccgcctggggctaaagcaaatggacaaagcaggaaagctagtatttctggctaaggaaggggaccatcttcaactgtctaaagaatggtttaatgcctacatcataccttttcttaaatgaagcccttgcactttgcagcagagctcaagaaaccccagctcttccaaaaaaacacatcaacagctctccatgcccaaccctcaactctaatctagcttgcaagcagttctccactcctgttatctaacatgccctacttggaaagatctaagatctgaatcttatcctttgctgcctcctatcaccatatgg

SEQ ID NO: 2134 - DNA, 508 bp, Cricetulus griseus
agcttcagtacatccgtggtcaggccctttgccaaacttgtgaggcccccggttcagatatatggcatcgagggtcgctatgctactgccctttactctgctgcagttaaacagaacaagctggaccaggtggagaaggagctgctgcgtgtgggccaactcctgaaggaccccaaggtgtctcttgccgttctgaatccctatgtcaagcgctctatcaaagtgaaaagcctgagtgacatcacagcaaaggagaagctttctccgctgaccgccaacctcatgaatttacttgctgaaaacggtcgcctagacaatacccatggcatcatctctgccttttccaccatcatgagtgtccaccgtggagaagtgccctgcatggtgaccacagcatctgctttaaatgaagctgttctctctgagttaaagacggtgctgaagagcttcctgggcaaaggccaagtattgaacctgaaggttaagactgacccgtcaatcatgggtg

SEQ ID NO: 2135 - DNA, 545 bp, Cricetulus griseus
agtcctcagctctgggtgcgtggcatccacagccggccggagcagcaccaccagctttcataggaggagcaaggcctctggggctgacggaggtggccctcggctgctgtccattgcgggcactcgaccgtcggtgcggaatggacagctgctggtgtcaaccgggctcccagccctggaccagctcttaagtggaggtttagctgttggaacagttcttctgattgaagaagataaatacagtatttattcacctttgctcttcaagtatttcctggcagaaggaattgtcaatgggcatactctgttggttgcatctgccaaagaaaagcctgccgacattttacaggaactccctgcaccactacttgatgacaatggtaaaaaagagcttgaagatgttcataattctaaaacaccagaatcagatgttaacatgaaaatagcctggcgataccagttgcaacccaagatgcaagttgggccagtgtcatcttcacgatttggtcactattatgatgtatcaaaaaggattcctcaggagc

SEQ ID NO: 2136 - DNA, 84 bp, Cricetulus griseus
tttcatttcactgttggtgaaagcaagaaggcatctgccaaagtttcagatgggatttctactcagtacccagttgtggatcat

SEQ ID NO: 2137 - DNA, 154 bp, Cricetulus griseus
  misc_feature (53)..(68): n is a, c, g, or t
  misc_feature (70)..(86): n is a, c, g, or t
ttcatgttgggcagttttggcacatgcctttagtccttagagtattagtgcannnnnnnnnnnnnnnnannnnnnnnnnnnnnnnnaccagccagttctacaagagttccaggacaggctccaaagccacagagaaaacctgtcttgaaacctc

SEQ ID NO: 2138 - DNA, 554 bp, Cricetulus griseus
atccagacagtgtcgctcggccagtctctcttcttccacttcccaccgctgctccgagacggcgagaactatgttgtgcttctggactccacgctctccagatcccagtatgactacgtcctgccgcaagtctctttcactgcagtgggctaccacaagcacatcactctggttttcagtcccacgagaaagctacctgagcaagacattgcacaaggttcctacatcgccctgcccctgacattgctgctcctgttggcaggctacaaccatgacaagctcattcctttgctgctgcaactgacgagtcgtcttcagggagtcagagccctcggccaggtggcctctgatagcagtggcccagaggacatgaagagacagaccaagaaacagaagaccagacgcacgtgaggaagaaaggctcgtcccctgcagatggcacaaccagggctgccacctgcctgggacaaaagcacatactcactcacttcaggcaggccctgggccctgtgacccttcttttggtgtcctgcctgtctgtcctctcctgtgta

SEQ ID NO: 2139 - DNA, 413 bp, Cricetulus griseus
tgtctgatttctgtctcttcctgaccattgggtatcctttatatgtaaataagataaggtaatcagatagccttattcagtctttatcattttcattcatcagattgttcctgtgtagattggacatttattgtagcactacataactgattttaaatctgtaaatgaattagcactttcatattgaaacaagcctgctagcctatgtataaaagcaaaactgtttgctgtttataaaaagggatataatggggtggggggcaagggtaatttcaggttaattattaatttaaaaatgaactagcaattttgtatctggtgactttgtggtgcactcacctctggtagtgacttgaattcggtatgtaaaaaggggttagtgatgtttcattgctgctaaaaatggcaactcc

SEQ ID NO: 2140 - DNA, 355 bp, Cricetulus griseus
cttcattgctgtagtttggattaactcccctcccgcctaccccttatcccaaactgcatttataatttgtgactgaggatcatttgtttgttaatgtactgtgcctttaactttagacaactttttattttgatgtcctgttggctcagtaatgctcaagataccaattgtttttgacaaaataaatttactgaacttgggctaaaatcaaaccttggcacacaggtgtgatacaacttaacaggaatcatcgattcatccataaatataaagaaaagtggtagcctgcattaaggctttgatacttgcagattggggaaaaacaaacaacaaacgtcttgaagcatattaatgg

SEQ ID NO: 2141 - DNA, 562 bp, Cricetulus griseus
cttcagaacacatggcagcctttggagtatttggtctctgtcagatccatgccttcgtagattacctgcgcagcaagttgaatccacagcaatttgaagttcttttccgaagtgttatctccctggttggctttgtcctcctcacagtgggagcactcctcatgctgacaggaaaaatttctccctggacagggcgtttctactcattgctggatccttcttatgctaaaaacaacatccccatcattgcatctgtgtctgagcaccagcccacaacctggtcctcctactattttgatctgcagctcctcgtcttcatgtttccagttggcctctattactgctttagtaacctgtctgatgctcggatttttatcatcatgtatggtgtgaccagcatgtacttttcagctgtaatggtgcgtctgatgctggtgttggcacctgttatgtgcattctttctggcattggtgtctcccatgtgctgtccacatatatgaagaatctggatataagtcgcccagacaagaagagcatgaagcaacaggatttcttcttacc

SEQ ID NO: 2142 - DNA, 489 bp, Cricetulus griseus
cagccctgtctttgggcttgtggtggacattcgatcgctcccgaagcggccttggacttgggatcaccatcgccttcctagctacgctgatcactcagtttcttgtgtataatggtgtctaccagtacacatccccagatttcctttatattcgttcttggctcccatgtatatttttctcaggaggcgtcacagtgggaaacataggacgacagttagctatgggtgttccggaaaagcctcacagtgactgaacttcagggcatggttcaaagtggaagcaggatgcggagacactggtcctgggtgtgatgaagactcttttttcctcaatgtcccatttagactgggctgacgatgataaatgactcctgaagaagtgttcacatggtctaaactagcaaatggaggcaaggactacttacctaaaagtcttaccttgctcacccaccctcacacctgtctgcactggaacattccattccaagc

SEQ ID NO: 2143 - DNA, 256 bp, Cricetulus griseus
tgggcgagcagtctgaatgccagaatggataaccgttttgctacagcatttgtgattgcttgtgtacttagcctcatttccaccatctacatggctgcctcaataggcacagacttctggtatgaatatcgaagtcctgttcaagagaattcaagtgattcgaataaagtggcctgggatgacttcctcggtgatgaggcatatgaaaagacttacaatgatgcactgttccgatacaatggcacaatgggattgt

SEQ ID NO: 2144 - DNA, 233 bp, Cricetulus griseus
agcgatgattatttctcttgttggtagatcttataacccttcaaacctgtttgtttttctttgaggatttatatcattttaaatgctctttcattatctttttttttttaacctaaaggaataggaaaatactgtttggtttttgggttttttgttgttgggggttttgttttgttttaagttatatcttaaccttggtatatgtctttcctttggataatgaggcttaaaag

SEQ ID NO: 2145 - DNA, 312 bp, Cricetulus griseus
cgcagaccccatcgttaccatgaatcctgccgtcttcctgtgtttacccgacctcagatgctccttgctgctgctggtaacttcaatttttacacctataacagcagaaataacaagtcttgattcagagaatatagatgaaattttaaataatgctgatgttgctttagtaaatttttatgcagactggtgtcgtttcagccagatgttgcatccaatttttgaggaagcatctgatgtcattaaggaagaatatccagataaaaatcaagtagtgtttgccagagttgattgtgatcagcactctgatat

SEQ ID NO: 2146 - DNA, 304 bp, Cricetulus griseus
  misc_feature (50)..(86): n is a, c, g, or t
actgtcattttcctgtttctcagcgcagtgaggaaggtaatggttatgannnnnnnnnnnnnnnnnnnnnnnnnnnnnnnnnnnnnaggcctcttctttttgtgtccttgtttctcctaggtaatgagaaaaggtctttttattgtcgctgtgttgctctctgagcatcttcttgtgtattcatgcagttgggagtgtttccacaaaattcacggcagccacaaaggaaaagtcctaaatcagactgtagtttagacacatgaccggggtgaagcaaacccacatggagtctttgatattcatg

SEQ ID NO: 2147 - DNA, 250 bp, Cricetulus griseus
gttggtggctgctgaaatgacgaccttagttctggataacggagcctacaacgccaaaatcggttacagccatgacaatgtctcggttatttccatgcgctagttcagatcaaaaacagcacgtcttaaaacatttactgctaaccagattgatgaaataaaagacccttcaggactcttttacattcttccttttcaaaagggctacttggtgaattgggatgttcaacgacaagtttgggattatctt

SEQ ID NO: 2148 - DNA, 489 bp, Cricetulus griseus
  misc_feature (245)..(269): n is a, c, g, or t
tattgggtcagcaggcagctgtttacctggggttttgctgcactattgcgatttcggaggggcttgggagcagttttttagaggattcttttgagagaaggcatcaagtccgtgtcatagcagtgtctgaggatgcctcctgtgactgatttccaattagacttgtactgtatataagagcctcttaaaatgtgggatcttcaattttttaactcaataaactagtaaagaatatctagtttccnnnnnnnnnnnnnnnnnnnnnnnnntaagttttctccccaaatacacgaagcttgactcagtcttgcactgacgttaactgccatactacctcttattatgtagatgtccatggaaagtgctccctggaatggaacagtttgaatgcaacagcccactctgaagaccgtgaggccaagcacctgccctagttgtgatctgttacacatttgtatttccagggagaatgtcaacttccctatctgt

SEQ ID NO: 2149 - DNA, 389 bp, Cricetulus griseus
gatcaatgagctcaaatgagaaggctcattgagtgctcattcccttgccacaggtggactttcctctcatccttttcctggatgagaccatagaaatccagcccctgaagttctcaccctcttccagtgccctgagactatgtctattatttatgcctaaaatctcagtcttccctcactagcaaatagtattataagaatggatgattaatgataattgactaagtcctgtctgggttgtgttttctggtatctttgtaagctacggatggaacaaagtctcctgcatgatgaacaatcactctaccgctggctctagctgtagtagttttccttagttggtaggattatggtataaattgtgcttttagtaatctttgagccgtgga

SEQ ID NO: 2150 - DNA, 470 bp, Cricetulus griseus
tcgccatggccctcagcgatgcagacgtgcagaagcagattaagcacatgatggctttcattgaacaagaagccaatgagaaagcagaagaaattgatgcaaaggcagaagaagagttcaacattgagaaaggtcgccttgtgcaaacccaaaggctgaagattatggaatactatgaaaagaaagaaaagcaaattgagcagcagaagaaaattcaaatgtccaatctgatgaatcaagcaaggctcaaagtcctcagagcaagagatgacctcatcactgagctgctaaatgaggcaaaacagagactcagcaaggtggtaaaagatacaaccagataccaagtgctgctggatgggctggtcctccagggcttgtaccagctgttggagcctcggatgattgtgcgttgcagaaaacaagaatttcctttggtgaaggctgcagtgcaaaaagcaattcctatgtat

SEQ ID NO: 2151 - DNA, 197 bp, Cricetulus griseus
  misc_feature (125)..(125): n is a, c, g, or t
  misc_feature (146)..(146): n is a, c, g, or t
acatgaagatcaagtccctggaggagatctacctgttctccctgcccattaagggaatccgagattattgatttcttcctgggcgcatccctaagggtgaggggctaaagatcatgccactgcanaagggggcgggggctggccancggaccaggggcaagggttttgtcgctattggggactacaacgggcatgtg

SEQ ID NO: 2152 - DNA, 513 bp, Cricetulus griseus
gctgcagcagcgaggccaagctccagtgccccacctgcatcaagctgggcatccagggctcgtacttctgctcgcaggaatgctttaaaggaagctgggctactcacaagttactgcataagaaagcaaaagatgaaaaggcaaaacgagaagtatgttcctggactgtagaaggtgatgtgaacactgacccgtgggcagggtaccggtacacgggtaaactgagaccacactatccactgatgcccacacggccagtgcccakttacattcagaggccagactacgctgaccaccccctatgaatgtctgaatcggaacaggctcttaaaggtacttcccaaattaaactactctcaactgaagatatagaarggatgcgacttgtgtgtaggcttgctaragaagtcttggatattgctgctgggatgattaaagcaggtgtaactactgaagaaattgatcacgctgtacacttagcatgcattgcaagaaattgctatccttctgccc

SEQ ID NO: 2153 - DNA, 375 bp, Cricetulus griseus
aatggcccgaaccaagcagaccgctaggaagtccacgggtgggaaagccccccgcaaacagctggccaccaaggcagccaggaaaagcgcgccctctaccggcggggtgaagaaacctcaccgctacaggcccgggaccgtggctstragagagatccgtcgctaccagaagtcgactgagctgctcatccggaagctgcctttccagaggttggtgagggagatcgcccaggatttcaaaacggacttgaggtttcagagtgcagccattggtgcccttcawgaggccagtgaagcgtacctggtggggttgtttgaagacaccaatctgtgtgccatccatgccaagagagtcaccatcatgcccaaagacat

SEQ ID NO: 2154 - DNA, 503 bp, Cricetulus griseus
  misc_feature (378)..(378): n is a, c, g, or t
atgtttacacaatgccagacacgaataattcakatttagatttttagtcacaagcctatggtttttaaaaattcaaaatgaagttctcacccagcaggtttttcgtttgactttstgaacaggttttgtcccaattgctgggattaaagatgtgctccaccacagaccakccttatgaggctattttaacctgtactgagtttagggattgcaaattctaattrtgtktatcattgattgtttcccaaggagtttgaacctgaggaaattttcagatatatagactctaagtaccatcctggactgtaggccagagtagcaaatacaccacagagtggtttgttggtctcactcgggaaggtgcaggaaagaaccaanctggtgtttggagggggaaggggagtattctgtgaagcatatgcagtgtggatacacccatttaaagaattagcattttcctgctctatcaagttcattcctgtacactgcctttatgagggaaa

SEQ ID NO: 2155 - DNA, 264 bp, Cricetulus griseus
acgtagaggtcagatgcctgtctcgtgacaaggaaccttaktcacttaraggtcagatgcctgtcttgtgacaaggaaccaatcggaagttagctggtggcgctatgctttatggctctgggtgtgctttacggacaagcgcacagcaatgacgtagagagcatagcaaccaccctgggagggcctatgagccataacaaccagttgaccaatcaacacagggcaagccctccaagcctggaggcacaccaatcatgagcctat

SEQ ID NO: 2156 - DNA, 527 bp, Cricetulus griseus
tcaaaaacacatgcagtgttggttgcattgaagagggcacagtcggaacttgcagctcaccagaagaaaattctccatgttgacaaccatattggtatctcaattgcgggtctgactgctgatgctagactgttatgtaattttatgcgccaggagtgtttggattccagatttgtatttgacagaccacttcctgtgtctcgtcttgtgtctctaattggaagcaagacccakatcccaacacagcggtatggccggagaccctatggtgttgggctgcttattgctggttatgatgatatgggccctcacattttccaaacctgtccatctgctaactactttgactgtagagctatgtctattggagcccgttctcaatcagctcgtacttacctggagagacatatgtctgaatttatggagtgcaatttagatgagctggttaaacatggtctgcgtgccttgagagaaacactccctgcagagcadgacctgaccacaaagaacgtttccattggaattgt

SEQ ID NO: 2157 - DNA, 552 bp, Cricetulus griseus
acagaagaggcttgcctctagcgtcctccgttgtggtaaaaagaaggtctggttggaccccaatgagaccaatgaaatagccaatgccaactcccgtcagcagataaggaagctgatcaaagatgggctgatcatccggaagcccgtgactgttcattcccgggcccgatgccggaaaaacactttggctcgacggaagggcaggcatatgggcatagggaaacggaagggtactgccaatgcgagaatgcctgagaaggtgacctggatgcgaaggatgcggatcctgcgtcgacttctcaggagataccgggaatccaagaagattgaccgccacatgtaccatagcttgtacctgaaggtcaaagggaatgtsttcaaaaayaagcggattctcatggagcacatccacaarctgaaggcagacaaggcccgcaagaagctcctggctgaccadgctgargctcgcaggtctaagaccaakgaagcacgaaagcgccgkgaggarcgyctccargccaagaaggaggagatcatcaagactctgtccaa

SEQ ID NO: 2158 - DNA, 399 bp, Cricetulus griseus
tggcacctcgcaagggaaaggaaaagaaggaagaacaggtcatcagcctcggacctcaagtggctgaaggagagaatgtatttggtgtctgccacatttttgcatctttcaacgacacctttgtccatgttactgatctttctggcaaggaaactatctgccgggtgactggtggaatgaaggtaaaggctgacagagatgagtcttctccttatgcagccatgttggctgcccaggatgttgcccagaggtgcaaggagctgggcatcactgccctgcatatcaaactccgagctacgggaggaaacaggaccaagacccctggacctggagcccagtcagccctcagagctcttgctcgttcagggatgaagattgggcggattgaggatgtcaccc

SEQ ID NO: 2159 - DNA, 538 bp, Cricetulus griseus
tgctagtgagctgtcgaggctgtctgtcaacagtgtgactgctggagactactctcggccccttcacatctctactttcatcaatgagctggattcaggtttccgccttctcaatctgaaaaacgactccctgaggaagcgctacgacggcttgaagtacgatgtgaagaaagtagaggaggtggtctatgatctttccatccgaggcttcaataaggagacagcagcagcttgtggtgaaaaataggagcctctccctgtggctggccttgccgactaggcatttgccagggagggctagcacagtgcctctcctctagttagcacgccagttgctaaacactgcgctttattttcgtaaccagctgtgtggcgtgaatatcagaattgagatactttttggatctaaaaaaaaaaaatcctttccactgataggattttctttgttgacgtttcagtgaacttgctgtgtaatttgttgtagtatcattttgtcaaaagtgtaaatgttggtctcttggtaaaagtccttttcttg

SEQ ID NO: 2160 - DNA, 1011 bp, Cricetulus griseus
ccgcggtcgcccagggactttgaatatgtcggggattgccctcagccgacttgcccaggaaaggaaagcttggaggaaggaccacccttttggctttgtggctgtcccaacaaagaaccctgatggcacgatgaacctgatgaattgggagtgcgctattcctggcaagaaggggactccatgggaaggaggcttgttcaaactacggatgcttttcaaagatgactatccgtcctcaccaccaaaatgtaaatttgagccaccactgtttcacccaaatgtgtatccttctggcacagtgtgcctgtccatcctggaagaagacaaggactggaggccagccatcacgatcaaccagctctttataggaatacaggaacttcttaatgaaccaaatatccaagaaccagctcaagcagaggcctacacaatttactgccaaaacagagtggaatatgagaaaaggttccgagcacaagcgaagaagttttgcccctcctaagcagcggcacttgttgctcccatgacggaggaagggattggcttggcaagaacttgtttacaaacttttgcatatctaagtcgctgcgtacaagttactagtcacctgggagggttgagcgggcgccattttccatttctgccactggcatttacagtctcaattcgctgaattgccccagttttcatacagggtctcttccttcagtcttttgtatttttgattgttatgtaaaacttgcttttattttaatattgatgtcagtatttcaactgctgtaaaatgataaacttttgtacttggtaagcccctaggagctagtttcttcgcgctcggatgcaggcatgcttcccactgttctctggcctccagctggctgtatgacagatccacactgtccctctctccccatcctcgtcctcctcagaaacctgggctgttgcttatgagcctcagatccaaagttggccagcgtctccattctgcacctcttcctttgtgtttatatg

SEQ ID NO: 2161 - DNA, 549 bp, Cricetulus griseus
cctggagaagactccctctgtagcaaccattcttctgacattgtgcggctttattgtcacctccagagttcacactttagacccaggaagtagatgacaaatgagtaaaaatgaaaaaattaggactgtgattttattgttaggctgtgttcatagttatcttcagcctcatgtggtccatggaccacagattagacacgccagctggacagcgaccctcgtctctgtgttttgctttgatttctccatgataaaatgaaaatgaaacattgccactcctgtgtcatcccttcactaagagaactttcacactcatgggccttttgtcccccagagcaccagatgtaacgtgaaccctactccatccacaatggaaatttggcaacacgctgccctcatccctgtagaaatgccgtggctccctagatagttctaggaagaactgcagtttcctatattttgtactagtcagctcttaattaagcacttgaatggagagaagcagtggtgcgcataatccaaaatcagtggatgccattttctggtgaa

SEQ ID NO: 2162 - DNA, 148 bp, Cricetulus griseus
tggaagatgccggcggtgatggccggctgacagaatggtggagatggcccgtgggtcgggccaggaaaggaggacgcccgctccggtggtgacccgcccaggtgtttactagattacctgagggagagggtgggatggggcgggggct

SEQ ID NO: 2163 - DNA, 574 bp, Cricetulus griseus
agagggcgccagtgaaaggcatcctctataagataagtcttataaaatatatagatttgtgataattaagactgagctaacagatgagaaatcctagtctttggccaagcatatttgtacctaatataagtgtctgtgtattatttggggccctaacttgtcgggcagactcgggtggctggtgtaaagcacccacgtggcagtagggctgcagtggcttttagcagaaagatttatggtaacagaatggtgtcagtgagcgggatgaccccatgccccaaggttcccagaggaagaggaaaacctgctgccacagccggcccttttgggctgctgagaggcatatgctcgcgccatcatggagttcatggaggttggactcggcactcccaagatgataaagacagatccagataaagaaaaacatctaaaggtttacactacatttaaaaatatctgtaggcttgtgagagaaaaaataacaggagaaaatagagtagttgggtgtggtggcagacacctttaatctccagactccaaakggagaggcaatcggatttccacagagaaaccc

SEQ ID NO: 2164 - DNA, 579 bp, Cricetulus griseus
  misc_feature (145)..(163): n is a, c, g, or t
catcccctatgatggcgagtctttccacctggagtacatggacctggatgagttcctgctggagaatggcatccctgccagccccacccacctggcccagaatctgctgctgcctgtggcagagcttgaagggaaggagtctgcnnnnnnnnnnnnnnnnnnnccaccatcctcctctactgctgtctttcagccctcggaaaccgtgtccagcacagaatcatccttggaaaaggagagggagactccaagtcccattgaccccaactgtgtggaggttgatgtgaacttcaatcctgaccctgctgacctggtcctctccagtgtgccaggtggggagcttttcaaccctcggaaacacaagtttgcagaggaagacctgaaaccccagcccatgattaaaaaagccaagaaagtcttcgttcctgatgagcagaaggatgaaaagtattggacaagacgcaagaagaacaatgtggcagcaaaacgctcccgggatgccaggcgcctgaaagagaaccagattaccatccgggcagccttcctggagaaggagaacacagccctgcggacggaggt

SEQ ID NO: 2165 - DNA, 527 bp, Cricetulus griseus
  misc_feature (301)..(341): n is a, c, g, or t
aggaggaagccactgttgtcgccgagagaatcctcacccccgccgctcgcgcgtggccatgtggaggctgctgacgcgcactcccgcgccgctcctgcgggtgcacgtttcagattcttgggcagcccttcccaccagtgctggtctgaagaccctcctcccagtgccaagttttgaagatatctccatccctgaaaggtccaagcttaagtttgttgaaagggtcccacttgtaccaaaagtaagaagagaacctaaaaatttgaaggacatacgaggaccttcaactgaagccactgannnnnnnnnnnnnnnnnnnnnnnnnnnnnnnnnnnnnnnnngttacctccactggggtcattttgaaatgatgcgcctgacaatcaaccgctctatggatcccaagaacatgtttgccaagtggcgagtaccggcccctttcaagcccgtcactctaaaaggtgtcgggcagcgcatggggggcggtaaaggtgccattgatcactacgtgacacctgtgaagactg

SEQ ID NO: 2166 - DNA, 358 bp, Cricetulus griseus
tcacagcttgcaagaagtaaagccttatcatatggagtatgttaggccttcgatggatatttttgtagtagtatagagtagtgcagtaactatgactgctttcttgtaacatttatggatgtgtatccacatatttgatggacataatattatgataagttcttatttttaattaaatttactattaggtgactgtttgagaacagtatatactctgtgtgaatcactcttgattgacgttttcattaaacccttgttgctaggatgccatctatgactgtcattgtaagaccatcagaaatattccttctctatgttttgggggcctgtaggagagtctggaatcctgttctactgc

SEQ ID NO: 2167 - DNA, 478 bp, Cricetulus griseus
cgattgaggccaggatggcaaaatgaagaagctggaagctggattgtcttgggtgcacatggtttctgtccgtctgcctggctccccacccccactttgggcttacaactgccattggaagagcttggatgtgggctgtcgttccccagattttccaaggtactcactacctgccaggaaactggaggggctcctgagggacattgaggaccatggctttccgagatactattgaagaccatacttggcctttgagtcccactctaaccctgacaattctagacctctcttccagtgtccttgtgagccatttgggttttgtctccttagtcatgagggtcacagcaagcaaggatgactgatacatgaccttcaccttgggcctccccagacttacactggggttgaggagagcaaggagacactgcctcttcaaggcccccaggaggtctcctcccagccatgttctttgtccatg

SEQ ID NO: 2168 - DNA, 495 bp, Cricetulus griseus
  misc_feature (462)..(462): n is a, c, g, or t
tgcgtcctaacaaccctggacagaacccagcatgtctcaggccaccaagagaaaacacgtggtgcaggaggtgctgggagagcacatggtgccctcagaccaacagcagatagtgaaggtcctgaggactcccggcaacaatctgcatgaggtagagacggcacaagggcagcgcttcctggtgagcatgccctccaaataccgaaagaacatctggatcaaaagaggggacttcctcattgttgaccctattgaagagggagagaaagtgaaggctgagatatcttttgtgctctgcaagaaccatgtccgttctctgcagaaggagggccactggcctgaggccttctctgaggtagctgagaaacaaaacagtatgaacagacagagtcagccagaactgcctgctgaaccacagctgtcaggagatgagtcaggttctgaagatgattctgacctctntgtcaacaccaatcacagacaatatcatgagag

SEQ ID NO: 2169 - DNA, 492 bp, Cricetulus griseus
aacccagtgcttctcaaagtgaagaaaaagctcctgagctgcccaaaccaaagaagaacagatgttttatgtgtagaaagaaagttggccttacagggtttgactgccgatgtggaaatttgttttgtggacttcaccgttactctgacaagcacaactgtccatatgattacaaagcagaagctgcagcaaaaatcagaaaagagaatccagttgttgtggctgaaaagatccagagaatataaaattactacatgtgaagagactgaaactttgtttttattttaatatatcgtaggaaaacattaaagagcagatgcatggccattttcctttgatgttctccagagttttgctttatatttgtctgtcgtataattgatattttaggatgtttgggtgtttgttacaggcagaattggatagatacagccctacaaatgtatatgccctccccctcataaaattggacaaaaatctgcgcaacaaatt

SEQ ID NO: 2170 - DNA, 264 bp, Cricetulus griseus
gaaagctgcaaagctgcatgtaatgggccttatgatgggaaatggagtaaaacaatggtgggatttgggcctgaggatgatcattttgttgcagaactgacgtacaattatggcattggagactacaagcttggcaacgacttcatgggaatcacacttgcttccagccaggctatcagcaatgccaggaagctggagtggccactcaaaaaagttgcagaaggagtttttgaaactgaggccccgggaggatacaagttctat

SEQ ID NO: 2171 - DNA, 551 bp, Cricetulus griseus
gtgacacttgagacccaggttctctttaaagtcctgttccagcattcctccatgtgattaacagccgggcctctgggttcctaggcaatgatcttccagttgagcaaccatttacttgacacaaattgtacctttctgttttcctacagtcaggttggtggtctacagggacacacactttgccacccaaccagaggtttcttgcagagattcctgatcactagtttattgcattagtaaactcagagatcaagaaagcagctggaatttaagggaaataaaacctgcactgcaccaaagctgtggggccctgtgtttcctctattgggtgatgatgttagcatcacttcccagcccatgtgtgactaaagtgcttggttttagccacagacaactacttaaatgtcacatcttggctgagcaaagttgggacaagggtttaacctgacataggagcaatgtgcaatccctaattcactgcacagtattataattgcaggacatttgtattttaaaactggatttggggaacattcatttgctccagcact

SEQ ID NO: 2172 - DNA, 592 bp, Cricetulus griseus
actgcgaccatggtctccggcagcagcggcctcgtagccgcccgcctgctgtcgcgcaccttcctcctgcagcataatgggatacggcatgcatcttatgacgcttcccggaaacatatctacattgatraaaataccaaggttatttgccakggtttcactggcaagcagggcacctttcacagccagcaggccttggaatatggcacaaaactcgtgggaggaacctcgccagggaagggcggcaagacacacctgggcttgcctgtttttaatactgygaaggaagccaaagagaagacaggagcgacagcttctgtcatttatgtacctcctccttttgctgctgccgccatcactgaagcagttgacgcadagattcccttggttgtgtgcattactgaaggtatcccacagcargatatggttcgggtcaggcacacactttcacaccaargaaakacgaggctaattgggccaaactgccctggaatcatcaatcctggagaatgtaaaattggcatcatgcctggccatattcacaagaaaggaaaaataggtattgtgtccagatctggcacgttgacttatg

SEQ ID NO: 2173 - DNA, 549 bp, Cricetulus griseus
agcttcaagacaaggccactgttctaaccacggagcgtaagaagagaggaaagactgtgcctgaggagctggtcgaaacccgaagagctcakcaagtaccggcaggtggcatcccatgtggggctacacagtgctagcattcctgggatccttgctctggacctctgtscttcggacaccaacaagattctcactggtggggcagataaaaacgttgttgtctttgataagagtactgagcaaatcctggccactcttaaaggccataccaagaaggtcaccagcgtggtgtttcatccttctcaggaactggwgytttctgcatccccasatgcgactatcakgatttggtcggtcccaaacacctcctgtgtacaggttgttcsascccatgagagtgcagtgacaggcctcagcctccatgctactggagactatctcctgagttcctctgatgatcagtactgggccttctctgacatccagacagggcgcgtgctcaccaaggtgacagatgagacttccggctgctctcttacctgtgcacag

SEQ ID NO: 2174 - DNA, 1389 bp, Cricetulus griseus
ccgaatctctgtgtactacaatgaasscacaggtggcaagtatgtccctcgggccatattggtggatctagaacccgggaccatggactccgttcgatcaggtcctttyggccagatcttcagaccagacaactttgttttcggtcagtctggggcaggcaacaactgggctaagggtcactacacsgagggagctgagctggttgactcygtcctggaygtggtkcggaaggaggcrgaragctgtgactgcctgcagggcttycagctgacccactcvctgggyggaggyaccggttcyrgtatgggcaccctggctcatcagcaagatccgmgaagaataycccgaccgratcatgamyaccttcagygtsgtaccytcwcccaaagtgtcygacaccgtggtggagccctacaaygccaccctgtcygtscatcagctggtggagaacaccgacragacctactgcatcgacaacgaggccctstacgacatcctgcttccgcackctmaagctcaccacgccsacctayggrgacctsaacmacctsgtctcggccaccatgagcggggtcaccacctgcctccgcttcccrggccagctcaaygcygacctccgraagytggcsgtcaacatggtscccttcccmcgtctccacttcttcatgccyggcttygcccctctcaccagccgygggagccagcagtaycgggccctcacygtgccygarctcacccagcaggtcttcgatgccaagaayatgatggcmgcctgtgacccccgccacggccgmtacctcaccgtggckgccgtcttccgygggcgsatgtccatgaaggaggtggacgagcagatgctsaacgtgcagaacaagaacagcagctacttygtmgagtggatccccaacaacgtcaagacsgcygtctgcgacatcccrccrcgsggcctcaagatggcmgtcaccttcatyggmaacagcacggccatccaggagctcttcaagcgyatctcsgagcagttcacsgccatgttccgccggaaggccttcctscactggtacacsggcgagggcatggacgagatggagttcactgaagccgagagcaacatgaacgacctcgtctccgagtaccagcagtaccaggaygccacygcggaagaggaagaggatttcggggaggaggcagaagaagaggcctaagscagasagagagagccctgcgtcttctcctcaggctrcttaagttccctcagctytcttcagctgcccgtttttctccttcagagttttctyttctgctgcctctgtcctgtttttttatttttttccatcggagggggggtaaacagtgcctggcacatagtaggcgctcaataaatatttgtt

SEQ ID NO: 2175 - DNA, 544 bp, Cricetulus griseus
cgccatgggcgctacttgacagtggctgccgtgttccggggccgcatgtctatgaaggaggtggacgaacagatgcttaatgtccaaaacaagaacagcagctactttgttgagtggattcccaacaatgtgaaaacagctgtctgtgacattccaccycggggcctaaaaatgtctgccaccttcatcggcaacagcacggcaattcaggagctgttcaaacgcatctcagagcagttcacagccatgttccgacgcaaggccttcctgcactggtacacgggtgagggcatggatgagatggagttcaccgaggctgagagcaacatgaacgacctggtgtccgagtatcagcagtaccaagacgccacggctgaggaggagggagagtttgaggaggaggcagaagaggaggtggcctagagctgttttaagcagtctaaagcatgggagcagtgtgaactctttattcattcacagcctgtctgctagccatgtccactgtgcatttgctgtcctgtcctgacatcacttgtacagatac

SEQ ID NO: 2176 - DNA, 483 bp, Cricetulus griseus
  misc_feature (373)..(390): n is a, c, g, or t
agccccggggactatgtgctcagcgtttcggaaaactcgcgtgtctcccactacatcatcaacagcagcggcccgcgccctccagtgcctccgtcgcccgctcatcctccgccgggagtgagtccctcccggctccgaataggagatcaagaatttgattcattgcctgctttactggaattctacaaaatacactatttggacactacaacattgatagaaccagtttccagatccaggcagggtagtggagtgattctcaggcaggaggaggcagagtatgtgcgagccctttttgactttaatgggaatgatgaagaagatcttccctttaagaaaggagacatcctgagaatccgggataagcctgaannnnnnnnnnnnnnnnnntaggacagcgaatgaaagagggggatgattccagtcccttacgtggagaagtatagacctgcctccgcctcagtatcggctctgattggaggt

SEQ ID NO: 2177 - DNA, 566 bp, Cricetulus griseus
tctggaagcaaaggagctggcactacagcccaaagatgacatcgtagatagagcaaaaatggaagatactttgaagaggaggtttttctacgatcaagcttttgctatttatggaagtgtcagtggtctctacgacttcgggccagtaagatgtgctttgaagaacaatatcatccagacctggaggcagcactttatccaagaggagcagatccatggagatcgactgcaccatgctcacccctgagccagttctaaagacctctggccatgtagacaaattcgctgacttcatggtaaaagatgtgaagaacggggagtgtttccgcgctgaccacctgctgaaagctcatttacagaaattgatgtcagataagaagtgttctgctgagaagaaatcagatatggaaagtgtcttggcccagctcgataactatggacaacaagaacttggggatctttttgtgaactataatgtaaagtctcccactactggcaatgacctgtctcctccggtaccttttaatttaatgtgcaagaccttcattgagccacgaggaaatatg

SEQ ID NO: 2178 - DNA, 504 bp, Cricetulus griseus
aaactgctggagaatcaagaagggcttcgtgcccaacatgcaggttgaaggagtattttatgtgaatgatgctctggaaaaattaatgtttgaggaattaaggaatgcctgtcgaggtggtggtgttggtggcttcctgccaggcatgaagcagattggcaatgtggcagccctgcccgggattgttcatcggtctattgggcttcctgatgtccactcgggctatggatttgccataaggaacatggctgcctttgatatgaatgaccctgaagcagtggtatccccaggtggtgtcggatttgacattaactgtggtgtccgcttgctaagaaccaatttagatgagagcgatgtgcagcctgtgaaggaacaacttgcccaggctatgtttgaccacattcctgttggggtgggatccaaaggtgtcatcccaatgaatgccaaagacttggaggaggcattggagatgggtgtggactggtctctgagagaaaggtatgc

SEQ ID NO: 2179 - DNA, 568 bp, Cricetulus griseus
  misc_feature (278)..(314): n is a, c, g, or t
tcaaattatatgaactctttccaggcttctcttccaaacttgagtattaaggagccttcatatagttcaagggtgagtctggagccagtgtgcggagtgctagcatgaaccggtttcagagatgtaataaaagtgtgcatgggatttcatgtgttgtaaaagctgaacaaattatgtagacatgtattttattaagaatgtgtgcaacttcttatgattataaaccttaaaaaatgctcagctggtgggtagtgatggcgcacggctttattcccaannnnnnnnnnnnnnnnnnnnnnnnnnnnnnnnnnnnntgagaccagcctggtctacaagagctggttccaggacagcctccaaagccacagggaaaccctgtctctaaaataatgtgtctgttactaggtattactactattaatattttgggatacttccttttgctctcactcttatgtgcattagtaaatgtgtctatttatatattggactttttttttcattttttgtttctttgaagatccacttttaaaataaaagtagatagtatgtacctatagagagaaaa

SEQ ID NO: 2180 - DNA, 260 bp, Cricetulus griseus
  misc_feature (62)..(62): n is a, c, g, or t
  misc_feature (188)..(188): n is a, c, g, or t
  misc_feature (208)..(208): n is a, c, g, or t
  misc_feature (223)..(223): n is a, c, g, or t
  misc_feature (227)..(227): n is a, c, g, or t
  misc_feature (234)..(234): n is a, c, g, or t
aaatgagcatcttactcaggaacattctagaatgtggcaataaggatgggggagggaaacantttcccgggctggttcgcaggggaaccctggctcaaggtctggttctgggaatccatggggtagaagtgacttcttgcaaatgggtcacgctactacgcatatggtgcatgtgggtggaacataantgtgacttttgcctcttttnagaggtcaggtttgntganaggtttnaaatgacctggaaagtccatccaatg

SEQ ID NO: 2181 - DNA, 507 bp, Cricetulus griseus
actggctggtgagtgtgcttccagagggatccagggtcggtgtggacccactcatcattcccacagattactggaagaagatggccaaggtacttcgaagtgctggtcaccaccttgtccctgtgaaggagaaccttgtggacaaaatctggacagaccggccagagcgcccctgcaagcccctcctcacactgggcctggattatacaggcatctcctggaaggagaaggttgcagaccttcggttgaaaatggctgagaggaacatcgtgtggtttgtggtcactgccctagatgagattgcatggctgttcaatctccgaggctcagacgtggagcacaatcctgtgtttttctcctatgcgattgtaggactagaggctatcatgctcttcattgatggggaccgaatcgatgcccccagtgtgaagcagcacctactccttgacttgggcctggaggccgaatatagaatccaggtcctcccttacaagtccatcctgagtg

SEQ ID NO: 2182 - DNA, 448 bp, Cricetulus griseus
  misc_feature (187)..(187): n is a, c, g, or t
gaacgggccatgaggcaatttgccatggatgccgccgctaccgcagccgcacagcgcgactctactctcatcagacactcccctcagccctcacccagcagcagcttcaacgagggcctgctggcaggcaaccacaggcaccaggagatggagagcaggttgaaggtgctccatgcccagatcctanagaaggatgcagtgatcaaggtccttcagcagcgatccaggaaagaccctggcaaggctacccagggcaccctgcggcctgccaaatctgtgccatccatctttgcggctgcagtggggattcagggctggcaaggactctcatccagcgatcggcaaaatgatgcacctggccggctgacagtggaccgtgtaccggcagaggagcccccggccacagctcctctccctacccacaccaagcacgggagcagagatggaa

SEQ ID NO: 2183 - DNA, 306 bp, Cricetulus griseus
  misc_feature (65)..(93): n is a, c, g, or t
tcggggctctgctctccatcctatgtgacggtcgctgcgtccttctccccgagggaggacgacgnnnnnnnnnnnnnnnnnnnnnnnnnnnnntggcaacttctccaccgcggatcaactggagatggtgaccgagctgctgggaggagacatggtgagtcagagcttcatctgcgaccctgacgacgagaccttcatcaagaacatcatcatccaagattgtatgtggagcggcttctcggccgccgccaagctggtctccgagaagctggcttcctaccaggctgcgcgcaaagacagcgccag

SEQ ID NO: 2184 - DNA, 115 bp, Cricetulus griseus
taacccgtaagtgctttctatcctgggaacctgtgttaggtgatcacaatgtaagctgcatgggataaggttgttttcctgttacaatgttgaaatccccttagctatgtttcca

SEQ ID NO: 2185 - DNA, 532 bp, Cricetulus griseus
  misc_feature (221)..(221): n is a, c, g, or t
cctggcccttggagaccattcgtcaagccaggtggatggagagagaaagaaaaggctagagaagagagttggggtccacctcgagaatcaagaccatcagaagaacgtgactgggatagagacaaagagagggatagagacagtcaagatcgagaggaggacaaggaccctgaaagagacagggaccgagacagagatggggaccgggaggatcgcttcanaagacccagggatgaaggtggctggagaagaggaccagcagaagaatcttcaagctggagagattcaagtcgccgtgatgatagagacagggatgaccgacgtcgggaaagagatgatcgacgtgatctgagagacctgagagaaagaagggatttaagagatgatagagaccggagaggacctcccctcagatcagagcgagaagaagcaagctcttggagacgagctgatgacaggaaagatgaccggactgaagatcgggatttacctcgtcgtgttcctcccccagttctttcaagagagagagaga

SEQ ID NO: 2186 - DNA, 483 bp, Cricetulus griseus
ttcacgctgttcctcctgctagtgcctctgggctgcattcatgctgcttttatttttgtgatgactatgtacacccagctttataatcggctctcctttgggtggaacaccgtcaagattgacatgagtgcagcccggagagatcctctcccaatcattccattcggattggctgcatttgctgcaaccttgtttgccttgggattagcactggggacaaccatagctgttgggatgttgtttttcatacagataaaaattattctcagaaacaaaacttccattgaatcatggattgaagagaaggctaaagatcgaattcaatattaccaactagatgaagtcttcgtttttccttatgatttgggaagtaaatggaagaattttaagcaggtatttacatggtcaggagtccctgaaggagatggactggagtggccaacaagaaaagactgccacccatatagcctaacaagagaacag

SEQ ID NO: 2187 - DNA, 573 bp, Cricetulus griseus
cccatgaagacttccaagttacagaggaagtgaaggccctgaccgcggagattgtgaagaccattcgggatatcattgccctgaaccctctgtacagagagtcggtgttgcagatgatgcaggcaggccagcgggtagtggacaaccccatctacctgagtgacatgggcgctgcactcacgggggctgagtcccatgagctgcaggatgtgctggaagagaccaatatacttaagcggctctacaaggccctatcactcttgaagaaggagtttgagttgagcaagcttcagcaacgcctgggccgagaggtagaagagaagatcaagcagacgcacaggaagtacctgctgcaggaacagcttaagatcatcaagaaggagctgggactggagaaggatgacaaagatgccatcgaggagaaattccgggagcgcctcatggagcttgtggtccctaagcatgtaatggatgtggtggatgaggagctaagcaagcttgcactgctagacaaccactcctctgagttcaatgtcacccgcaactacctggactggctgacatccatcccat

SEQ ID NO: 2188 - DNA, 503 bp, Cricetulus griseus
  misc_feature (351)..(388): n is a, c, g, or t
cagaatggcacctgtaatcacagaggaaaccaccctccatctagaggatatcattaaacagaggatacgagatcaggcttgggatgatgtagaacgaaaagaaaagcccaaagaggatgcgtatgaatataagaagcgcctgacattagatcatgagaagagtaagctgagccttgctgagatttatgagcaggagtatatcaaactcaaccagcaaaaaaccgaagaagaagaaaatccagagcatgtagaaattgagaagatgatggattctctcttcctacaattggatgccctatcaaacttccacttcatccccaaaccgcctgttcctgaaattaaagtggtatnnnnnnnnnnnnnnnnnnnnnnnnnnnnnnnnnnnnnngtgagtgtcagtgatgcagccctcctggccccagaggaaatcaaggagaaaaataaagctggagatataaaaacagctgctgagaaaacagctacagacaagaaacgggaacgga

SEQ ID NO: 2189 - DNA, 277 bp, Cricetulus griseus
gcgggccatggcttcatcctctctgttatccgcgttggctgtgcggttgctgcgccccgcgcccggctgccacccgcgcctgcagcccttccacctggcggcagtgcgaaatgaagctgtcgtcatttctggaaggggggggggtcatcagatcaagcaagaagtgcggcaggaggtggaagattgggtggcctcatgcaacaagcggccacacctgagtgtcattctggttggtgacaatcctgccagtcactcctatgtgctcaacaaaaccagg

SEQ ID NO: 2190 - DNA, 401 bp, Cricetulus griseus
  misc_feature (304)..(340): n is a, c, g, or t
tacatgtggtgcttagcagcaaggtctgccgtggctacttgatcaagatgggtggcaagattaagtcatggaagaagcgctggtttgtctttgatcggctcaagcgcaccctttcctattatgtggacaaacgtgaaacaaagctgaagggggtcatctacttccaggccatcgaggaagtgtactatgaccatctgcgcagtgcagccaagagtccgaatccagccctcaccttctgcgtgaagacccatgaccggctgtactacatggtggccccgtctgcagaggccatgcgcatctggannnnnnnnnnnnnnnnnnnnnnnnnnnnnnnnnnnnngttcatgaactaactaccacgcacctcctgggtacaggtcagcaccaggacctatgccctg

SEQ ID NO: 2191 - DNA, 578 bp, Cricetulus griseus
accatggagtaactactggttgaagttgatgcagagaattctggaccttgaggacaaagactaaaatgacttctataatgaggaaggagcatgtcttttgggcatttgtatgtctgttgctcagcattgtcccggagcttcttagtgctctgcctgaggaagttgatggacatgcaaaaaccacagattcagaacagccaccaatgaaaccgaagcatacattttgcgcaatgaaggtagatgatggaccgtgcaaagccatgataaggagttattttttcaatatttttacttaccaatgtgaagaatttatatatgggggatgcagaggaaacgaaaatcgatttgaaaccctggaagaatgtaaggagacatgcatcagaggttataaaaagaagactgtaaagacaccatctggagcagaaaagccagatttctgcttcttggaagaggaccctgggatctgccgaggcctcattactagatatttttataataaccagtcaaagcagtgtgagcaattcaagtatggtgggtgcctaggcaaccgcaacaactttgagactttggatgaatgc

SEQ ID NO: 2192 - DNA, 575 bp, Cricetulus griseus
  misc_feature (416)..(467): n is a, c, g, or t
cgtttcctgcgctgcgttctgtgtgtctcctcgttttcctcgccgtcctccggttcccgaggccgccgcgcgtctcctcgcgaagcatggcgacgaaggccgtgtgcgtgctgaagggcgacggcccggtgcagggcaccatccacttcgagcagaagggaagtggtgaaccagttgtggtctcaggacagataacaggactgactgaaggccagcatgggttccatgtgcatcagtttggggataatacacaaggctgtaccagtgcaggtcctcattttaatcctcactccaagaaacatggcggaccctcggatcaagagaggcatgttggagacctgggcaatgtgactgccgggaaggatggtgtggccaatgtgtccattgaagatcatgtgatctcactctcgggagannnnnnnnnnnnnnnnnnnnnnnnnnnnnnnnnnnnnnnnnnnnnnnnnnnnggcaaaggcggaaatgatgaaagtacaaagactggaaatgctggaagccgcttggcttgtggtgtgatcgggattgcccagtaaacattccctgtgtgactgagtctc

SEQ ID NO: 2193 - DNA, 507 bp, Cricetulus griseus
ccagtatgctgtgcttgaaaatcagaagtacagscacwcacagtacagttaaacaatggtctttgctaagccttccaagataattagaccacagctraccwccwagaacagycattcagsgtsttgrttsctggatcaacagtgctgactgatgakaggaakacttcraktccagwaactgtccctgttgcactatggaagttcaagagkcacaactgrtckctatatgtgtyggatttamgggtgwkttcattgycttaaakacttgwkaattasattcaryaktgttyccatasttgctctgcatataaaaycaaacctgsagmcagtggkcatttcaaacatctttatgttcagatactgagccttcgcaagggtgactacctcagatttgctgcacttaattgtggatttcatgtggatcacaacttctgcataagattacagctattagtgtcggcgtgaaccttgaaaccaactcgactggattcctgtcaaagccttcaa

SEQ ID NO: 2194 - DNA, 586 bp, Cricetulus griseus
agagcacatggatgccataaatcatgacaccaaagagctggagaagatgaccaaccgacagggcatgctgctgaagaagaaggaagagtgcatgaagaaaatccgggagttggggtcccttcctcaggaagcctttgaaaagtaccagacactgagcctgaagcagttgtttcgaaaacttgagcagtgcaacacagaattgaagaagtacagtcacgttaacaaaaaagctttagatcagtttgtgaatttctctgagcagaaagaaaagttgataaagcgacaagaggaactggataggggctacaaatcaatcatggaattaatgaacgtgcttgaacttcgaaaatatgaagctattcagttaactttcaaacaggtatctaagaacttcagtgaagtattccagaagttagtacctggtggcaaaacaactttggtgatgaagaaaggagatgtggagggcagccagtctcaagatgaaggagaagggagtggcgaaagtgagaggggctctgggtcacagagcagtgtcccatcagttgaccagttcacaggagttggaatcagggtgtcatctacagga

SEQ ID NO: 2195 - DNA, 576 bp, Cricetulus griseus
ctacttaattgatgggtcccacaagatcacccagagcaacgccatcctgcgctacattgcccgcaagcacaacctgtgtggagagacagaggaggagaggattcgtgtggacattgtggagaaccaggctatggacacccgcatgcagctcatcatgctctgttacaaccctgactttgagaagcagaagccagagttcttgaagaccatccctgagaagatgaagatgtactctgagttcctgggcaagcggccatggtttgcaggggacaaggtcaccttatgtggatttctcgcttatgatgtccttgatcagtatcaaatgtttgagcccaagtgcctggatcccttcccaaacctgaaggacttcttggcccgctttgagggcctgaagaagatctctgcctacatgaagaccagccgcttcctccggagacctatattttcaaagatggcacagtggagtaacaagtaggcccctgctacacgggctctcatatggaggacctgtgcacactggatcctcctggccctggggacagctggtcttctgcactgctgcctcaaggttctcac

SEQ ID NO: 2196 - DNA, 525 bp, Cricetulus griseus
tgtcctggtaacagcctacgttcccaatgcaggcaggggtctggtaaggctggagtaccgacagcgttgggataaagccttttgcaagtttctgaaggacttagcttcccgaaagcctcttgtgctatgtggggatctcaatgtggctcatgaagaaattgaccttcgtaaccccaaaggaaacaagaagaatgctggctttactccccaggagcgccagggctttggggagttgctacaggctgtaccacttactgacagcttccggcacctctaccccaacaccccctatgcctataccttttggacttacatgatgaatgctcgggctaagaatgtcggatggcgccttgattactttttgttgtcacactcccttttgtcttccttgtgtgacagcaagatccgctccaaagctcttggcagtgatcactgtcccatcaccctttacctagcactgtgacacccctgctgaagtaacttacacctgggaaatagcctcctctcaagtccagtgtcctttag

SEQ ID NO: 2197 - DNA, 529 bp, Cricetulus griseus
acatctacaatgtgggctccagtgcggcgttagatgtggaattatctgacgattccttccccccagaagactttggcattgtctctggtatgctcaatgtcaagtgggaccggattgcccctgctagcaatgtctcccacaccgtggtcctgcgtcctctcaaagccggttacttcaacttcacctcagcaactattacctacttggcccaggaggatgggcctgttgtgatcggctcaacaagtgctcctggacagggaggaatcctggcccagcgggagtttgaccggagattctccccccattttctggactgggcagcctttggagttatgaccttgccttccataggcatccctctgctcctgtggtattccagcaagaggaaatacgatacccccaaacccaagaagaattgaatgcagtgtttccttggcccttttctcccacaaaaccaggtgttttccagacttcatagggtgtcaaatgtgttctcttggcccttggcctatggccatcttttcctgga

SEQ ID NO: 2198 - DNA, 518 bp, Cricetulus griseus
  misc_feature (389)..(389): n is a, c, g, or t
  misc_feature (484)..(484): n is a, c, g, or t
agtacaactggttcttccttgcacgccccagtacttttgctgtgattgaaaatctaaaatattttttgttaaaaaaggatccatcgcaggctttctatctaggacacactgtaaaatctggagaccttgaatatgtgagtgtggatggagggattgtcttaagcatagagtcaatgaaaagactcaacagccttctcagtgttccggaaaagtgtcctgaacaaggtgggatgatttggaagatatctgaagataagcagctagcagtctgcctgaaatatgctggagtatttgcggaaaatgcggaagacgctgatagaaaagatgtatttaataccaaatctgttgggcttttcattaaagaggccatgtctaaccacccgaaccangtagtagaaggatgctgttccaatatggctgtcacttttaatggactaactcctaatcagatgcatgtgatgatgtatggggtgtaccggcttanggcctttggacatgttttcaacgatgcgttggtt

SEQ ID NO: 2199 - DNA, 337 bp, Cricetulus griseus
atgcccgggatttcactgtttccgccatgcatggagatatggaccaaaaggaacgagatgtgatcatgagggagttccggtctggttctagcagagtattaattaccactgacctgttggccagaggcattgatgtgcagcaggtctccttagtgatcaattacgaccttcccaccaacagggaaaactacatccacagaattggtcgtggtggtcgctttggccgtaaaggtgtggctatcaatatggtgacagaagaagacaagaggactcttcgagacattgagacattctacaacacctgcattgaagagatgcccctcaatgttgctgacct

SEQ ID NO: 2200 - DNA, 446 bp, Cricetulus griseus
ttgaaatcatctcttcagtaactggaggaaggatttgagacagttaaaataatgcatttatgctgtcataaggtttatgagctgtatcttagaaaatgctgtgcgagagcaactctgatacatcattcatgtggcttaatttggaattcttactctgaaatgattaattgaatttagtgttttttttcttttctgtctgactaataactaaaatagtgaacttgggtacagtggtgcattcatgtaatcctagcagctcaggatacttaaggccagaggattgctagtttgagacaagcttgagcaacaccctgtattaaagtaaaataaggtacagtgaaatcaaataaaaaattcagaccacaaactaaatacttgagacaaaaggggggctgtattttctttctcttttcagacagcactttccataggctagtgaatgtacc

SEQ ID NO: 2201 - DNA, 1262 bp, Cricetulus griseus
  misc_feature (454)..(483): n is a, c, g, or t
caaggatgttctgttcttgaaggactgtgtgggcccagaagtagagaatgcctgtgccaacccagcagctggcactgtcatcctgctggagaacctccgctttcatgtagaggargaagggaagggaaaagatgcttctggcaacaagattaaagctgagccagccaaaatcgatgctttcagagcctcactatccaaacttggggatgtctatgtcaatgatgcttttggaactgcacaccgagcccacagctccatggtgggtgtgaatctgccacagaaggctggtggatttttgatgaagaargagctgaactactttgccaaagctttggagagtcctgaacgccccttcctggctatcttgggaggagctaaagttgcagacaagatccagctgatcaataatatgctggacaaagtcaatgagatgatcattggtggtggaatggcnnnnnnnnnnnnnnnnnnnnnnnnnnnnnnggagattggaacttctctgtatgatgaagaaggggccaagattgtcaaagatctcatggccaaagccgagaaaaatggtgtgaagattaccttgcctgttgactttgtcactgctgacaaatttgatgagaatgccaagactggccaagctactgtggcctctggtatacctgctggctggatgggcttggactgtggtactgagagcagcaagaaatatgctgaggctgtggctcgagctaagcagattgtttggaatggacctgttggggtttttgaatgggaagcttttgcaaggggaaccaagtccctcatggatgaggtggtaaaagccacttctaggggttgcatcactatcataggtggtggagacactgccacttgctgtgccaaatggaatacagaggataaagtcagccatgtcagcactgggggtggtgccagtctagagctcctggaaggtaaagtccttcctggggtggatgctctcagcaatgtttagtattttcctgccttttggttcctgtgcacagccagcctctaagtcaacttagtgtgtttccacatctccatttggtgtcagctagtggcggagatgcagcaccaggaacccttaaacagttgcacagcatcttaggctcgtctttactgcatcgggatttgtctacattcttcaagatcccattttaatcccttagtggctaagtgcattctagagtgcatctatttatattctgcctgaaaagaaagtgagctataaaagcttagttctctttgag

SEQ ID NO: 2202 - DNA, 1344 bp, Cricetulus griseus
catccagtcggatcgggaaaatacaagcaaatttagcaattaatccagcagccttgctgcccacggcagctctgcagatcccaggaacaaagcctgctttatgtgaattagcttttccttcatctgaacctggaaggagccatggcccggaaagcgtgccgactcttgctgggagtgaggaggctggtgtgagcttcgatcttccagcccaggcagataccttacacagtgcaaacaagagtcgtgttaaagtgagaggaaagcgtaggccacagacccgcgctgctaggcggctggctgcccaggagtccagtgagagtgaggatatgagtgtctccagaggacctgttgcacagttggccagtagtcccatcttaccaaatggccatcaacctcatctgcagcccaggatggccagtggagagatcagctctgagaaagccatggccccagctgctccaccttgggaaagtggtcctgcattgtctgcagtggacagaagcttttttgtggcgtctctgcctcagactggaaatgaggctgacctttttgattctggggacatctttccaaagagcataggatcacagtccatggagggaacaaaagtcaaggcagcagagaccccagcccacttgtcaggaggaagtaaagagaagagcctcgtgttccctgctctcagtgaggccagcagtactgacgatctcttccagactgtcaaaccaagaccagcaaagaaaaggaacccttttcccctccttgaagatgaggatgatctctttgcagatcggaaaggaaaaaagaatgagttgaaatctgacagccatcaggacattatatcaaaaacacaagacatttttgaggatgatatatttgctacggaagctgtgaaaccttttcaaaaaaagagagagaaggagagaactttggaacccaacttatttgatgataatatcgatatctttgctgacttaaatgtaaaacccaaagaaaagtccaaaaagaaagtggaggccaagtctgtgtttgatgatgacacagatgatattttctcctctggtctccaggctaagaagtccaaacccaaaagccaatctgcagaggccacatctgaactaagatctgatcacaaagtgtccaacatttttgatgaccccctgaatgcctttggaagccagtagagcatatggggtcttcatagttcatcttaccattctatttccagttagtgatgctgtcttctacactctgtcttcactggattccaaaagcaaatactgaaacaactagttcaactgttactcaatgtaactaatatttttctgcactgactttatgcttaag

SEQ ID NO: 2203 - DNA, 486 bp, Cricetulus griseus
gctgggcatgtacgtaccactacaggttcaccctgacatacttccgggtccaggacaggatggggctctacactgtccgacgtgtgcgcaagggtagaaaaattaggaccttgtgctggatagaagataatgcctgaagacttggatgaaaatctggactaccgactgatgtgggaggtccgtgtgaccaaaggagaatttctgtatattttagatgctaccaaccccagacactccaactggtttcgatttgttcatgaagcaccatctaaagaccggaaaaacctggctgccattcaagaacgatagaatattttctactgcactctatgatattcaaactgataccgatcttctgattggctacctggacagtgatgtggaaacacgggacgaggatgagcaacaccctctcaccatgaacaaagaatgcaaatgtgaccactctagaggacaatcatcagctgcatgcgaatgtactgcata

SEQ ID NO: 2204 - DNA, 92 bp, Cricetulus griseus
cttcttatcaatttactcttccttgcaattgcattctatattttctggctatggcttctatgaaaaaaaatctctggttttctgttttgaca

SEQ ID NO: 2205 - DNA, 511 bp, Cricetulus griseus
gcacattgctttttatctgtgataactaagagatgaatatgattggccaggactcagaaattataagttcaccttgacaagacatctagcaacaccagaactttaccactgaacttaatttgccactaactcaaatagcctcacagacctgtttgccaagtaggaggctggttttcctgtttctcatcaccaatgtggtgaggcactgatcaatctgacttgaatggaaatgctgtggtgaatcccagagtatgatgctaatggaaattattaggacattactcctagtgatttttgagtttgattaccaaggaagaatcacttcagctactataagtcaaccttatgagcaaagattaagctctttgtacctggtcttaatcctggatgttgttttttttattgcccaatgtccattccatctcactataacaacttcctggagttttttggaaccatctcttccaattttcagtccatgtgatttagacagtcttgttgaatcttgtgc

SEQ ID NO: 2206 - DNA, 343 bp, Cricetulus griseus
  misc_feature (50)..(62): n is a, c, g, or t
  misc_feature (65)..(79): n is a, c, g, or t
gcacacacctttaatctcatggtgttgatggcacacgactttaagttgannnnnnnnnnnnnatnnnnnnnnnnnnnnnccactcgggagtaagaggcagatggatctttatgagtccaaagcctgcctggtccggcagatcgaattccaggacaggctccaaagtcacataaaaaccctgcctcaaaaagaagttaatctactgtttaatgaatataaggctatctctattcagtttttaagttcagctgtgtctgttcaaacattctacttacctataaccatttacagactaattcatttacataattttgaccttatctagccatttgcatgtttaatg

SEQ ID NO: 2207 - DNA, 288 bp, Cricetulus griseus
gttgttctcttcatttcaggaaggcctaactccatctctttcttctctggctactctgttgaagtctctcttcatccttcttcccttcccagctaccccttggtcattttttcctgtaggtgctctgatgtagcaaacagctgtacctattggcaactcagtgcacgagactggcaaggcatgcactatgaagcatgatagcaggtctatggtctgcccaggctccccatgtccttgtctgatttccctctgagtaattttgcagggtttatctgtctattccatttc

SEQ ID NO: 2208 - DNA, 1333 bp, Cricetulus griseus
  misc_feature (1129)..(1190): n is a, c, g, or t
cacaagctacaaaagttgtggtagagcagagtccattattaggctttggtgcaatagctattgctgtattgtgctctggatttgcaggagtttattttgaaaaagttttaaagagttcagatacttccctttgggtgagaaacattcaaatgtatctgtcagggatcgtggtgacgttagttggtacctacttatcagatggagctgaaataaaagaaaaaggatttttctatggttacacgtattatgtctggtttgtcatcttccttgctagtgttggaggcctctacacttctgttgtggtcaagtacacagacaacatcatgaaaggcttctcagcagctgcagccattgttctttctaccattgcttcagtgatgctgtttggattacagataacactttcctttgcaatgggagctcttcttgtatgcatttccatatatctctatgggttacccaggcaagacactacctgcattcaacaagaagcaacttcaaaagaaagagtcattggtgtgtgattggaatcttaagatactcctataacgactaaactgtcaataataaattagagccttaagtcaaccccagatggtagcttaaacaatatcaacaaaattactgtatggcattaaggtacagagaactgtatgagtgaatgcttaacagatttatttagagtgtttggtatcaagctgtattatttcagaatgaaggactttactacagagagagagtgtgtgtgcatgtgtgtatgtatactgtgtacacagagcatggagtttacatggtatcaagaggcatgcacagaggagacaacacagggttacaacatcaggtgaaactacaatattcaatcaaggtttaagatttggtatctgaaggttcaagtgccaaagccatttctgtcacactgttctctcgttcaggtaccaggaggggaagcttagccttccttgttgtccagttcatggatagtactttgtccctgtagtagcaaaaaatctagctgcttttatcaaagtgaagaatgaataagataagacagttcagaacaaaaccagtgtgtaacttctaaaacagaacctatttcatggctcagacactgacttctgtcgtttgaatnnnnnnnnnnnnnnnnnnnnnnnnnnnnnnnnnnnnnnnnnnnnnnnnnnnnnnnnnnnnnnagctgatatacttttcagaaaattttctaagtcgcttttatactttcttttttataaagtatggttacctgttgggctctcaatttgtgaactttaagtgatttaaaatatttctataatgttaacggggaaatccagcaata

SEQ ID NO: 2209 - DNA, 268 bp, Cricetulus griseus
acgtgttcgaggtggagaagatcctggacatgaagtgcgagggaggtaagaacctttataaagttcgatggaaaggatatacgtctgatgatgatacctgggagcctgagattcatctggaggactgtaaagaagtttttcttgaatttaggaagaaagttgccgagaacaaagctaaagcaatcaagaaagatattcagagactgtctttaagcaatgacatatttgaagcagactttgatagtgaccagcaaagtgacacaaaaga

SEQ ID NO: 2210 - DNA, 199 bp, Cricetulus griseus
tttcctgtaaaccgacagaaaacattacatttaggcagataatgcacaaagcaatgacattttcgtttattactgaaattgctgattatctaaagcatggttttaatgtttttataaaatttgggtatgttctttaatcttcttaggcggatgctccaactccctcgagcacacccgatttacagtgctacaaacacag

SEQ ID NO: 2211 - DNA, 594 bp, Cricetulus griseus
gcaaaaatacagacttcttcattggcaagccgaccctgagagagctgacgtctcagcacccttatgcagaagtcttcatcggccggccacacgtctggaccgtggatctgaacaatcgagaggaagtagaggatgccgtgaaagccatcttaaaccagaagattgagccgtatatgccgtatgagttcacatgtgaagggatgctgcagagaatcaacgcgttcatagagaagcaggacttctgccatggccaggtgatgtggcctcccctgagcgccttgcaggtgaagctggctgagcctgggcagtcctgcaagcaagtgtgccaggagaaccagctcatctgtgagccatccttcttccagcacctcaacaaggaaaaggacttgctgaagtacagagtgacctgccaaagctcagaactgtacaaggacatcctggtgccatccttctaccccaagagcaagcactgtgtgctccaaggggatctcctgctcttcagttgtgccggggcccaccccacacaccagaggatctgcccctgccgggacttcatcaagggccaagtggccctatgcaaagactgcctatagc

SEQ ID NO: 2212 - DNA, 480 bp, Cricetulus griseus
  misc_feature (306)..(325): n is a, c, g, or t
ttttttacgagaagccgtcaaaatggccgaagtggagcagaagaagaagcggaccttccgcaagttcacctaccgcggcgtggacctggaccagctgctagacatgtcctatgagcagctcatgcagctttacagcgccaggcagaggcggcggctgaaccgcggcctgcggcggaagcagcactcgctgctcaagcgcctgagaaaggccaagaaggaggcgccgcccatggagaagcccgaggtggtgaagacgcacctgagggacatgatcatcctgcccgagatggtgggcagcatggtggnnnnnnnnnnnnnnnnnnnnttcaaccaggtggagatcaagcctgagatgatcggccactacctgggcgagttctccatcacstacaagccggtgaagcacggccggcccggcatcggtgctacccactcctcccggttcatcccgctcaagtaactgcccaataaagactctag

SEQ ID NO: 2213 - DNA, 484 bp, Cricetulus griseus
  misc_feature (28)..(50): n is a, c, g, or t
  misc_feature (103)..(137): n is a, c, g, or t
  misc_feature (166)..(201): n is a, c, g, or t
  misc_feature (307)..(339): n is a, c, g, or t
ggcaagaccatcaccctagaggtggaannnnnnnnnnnnnnnnnnnnnnngaaggccaagatccaggataargagggcmtcccccccgaccagcagcgactcnnnnnnnnnnnnnnnnnnnnnnnnnnnnnnnnnnntctttctgattacaacatccagaaagagnnnnnnnnnnnnnnnnnnnnnnnnnnnnnnnnnnnnctattaattcttcagtctgcattcccagtgggcaatggatggcattaatctgcactatagccatttgccccaatttaagtttagaaaatccaagtttcagtaatannnnnnnnnnnnnnnnnnnnnnnnnnnnnnnnnttgttgcatggtaagcatacatggtgtcatttgtgaagtttctatggtggcttgggtgggggacttcccctactgtctttagagattggtatttaactaaaatttgcgtcacttatgtcttagctgagttgggaacttcgtttaa

SEQ ID NO: 2214 - DNA, 360 bp, Cricetulus griseus
aattgacaatacagaccttggctatgaagtacttccaattaatactcagtatgagggaatgagagactgtataaataccattaagcaggaggaaggagtgtttggcttttataaagggtttggtgctgttattatacagtatacactgcatgcggccatcttacagattaccaaaattatttactccacacttcttcagaatagcatttgagatttaggttctatcattggctgatccaaaaatgtggtctggataatttgctctgaaattgtaagtaatgaaagtaaaatgctgggtggaaagaagtagactgggaattgagactggtggaaaagctcatgctggctatactaacttct

SEQ ID NO: 2215 - DNA, 556 bp, Cricetulus griseus
ccgcgcagcggctggcaccatgaagatctggacttcggagcacgtctttgaccatccatgggaaatggttaccacggctgcaatgcagaaataccccaaccccatgaatcccagtgtagtgggcgttgacgtgctggacagacatgtggatccctctggaaagctgcacagccacagactcctcagcacagagtggggcctgccttccattgtgaagtctcttattggtgccgcaagaacaaaaacgtacgtgcaggagcactctgtggtcgacccggtaaagaagacaatggagctcaagtccaccaatatctcatttacaaatatggtctcagtagacgagaggctcacatacaagccgcacccccaggacccagagaaaactgtcttgacccaggaagccatcatcaccgtgaaaggggtcagcctcagcagctaccttgaaggactcatggcaagcaccatatcttccaatgctaacaaaggccgagaagcaatggaatgggtgatccataaactgaacgctgagattgaagacttggcagcatcagcaaga

SEQ ID NO: 2216 - DNA, 311 bp, Cricetulus griseus
agcggcgctgcctggacaagcgcacgccggcgcaagcggccttcgagaagatgcaggagaaacggcaaatggaaagaatcctgaagaaggcatccaaaacccataagcagagagtggaggacttcaacagacacctggacacactcacagagcactatgacattcctaaagtcagctggaccaagtaacctgcccctggtgcaaaagacaggccaggttggctgtattgctccctcagtgttttctagaatgttctacatctgcctggtgcatctgctgagcccaagctttctgaaacttgaattaaagtc

SEQ ID NO: 2217 - DNA, 401 bp, Cricetulus griseus
  misc_feature (217)..(246): n is a, c, g, or t
tgtatatctgcaaggccagaatgtgaaggcaagccacggaaaagatgctgctgttgagaccaagattgctgagtccttgagattcagagtgggctgtccgctgacttcaaccttggagagcacccctgacaatcctgaggcttcaccgggagctagagccagctaacatttccttgtttaaagactgcctttgatttttcccttgattccatgtatnnnnnnnnnnnnnnnnnnnnnnnnnnnnnngaatcaatgttggcaatacctagttctacttctcaaactggagcatcctcctctatatatttatatgtatgtgttctgtagtcctcctcatgtacctattgtgtattttttttcctaatatttaagcacatgccttttgtgttacacaatatatg

SEQ ID NO: 2218 - DNA, 1137 bp, Cricetulus griseus
  misc_feature (1098)..(1112): n is a, c, g, or t
ccaaagccaagatgcccatcgtgggcctgggcacctggcagtctcccccaggccaagtcaaggaagctgtgaaggtggccattgatgctggataccgccacattgactgcgcctatgcgtattacaatgagcacgaagtgggagaggccattcaagagaagatcaaagagaaggctgtgagacgggaagacctcttcatcgtcagcaagttgtggcccacctgctttgagaggaaactgctaaaggaggcctttcagaagaccctcacggacctgaaactggactatctggacctgtatcttattcactggccacagggacttcagcccggaaaggagttatttcccaaagacgatcaaggcaacgtcctcaccagcaaaataacgttcttggatgcctgggaggtcatggaagaactggtggatgaagggttagtgaaagccctgggtgtctccaacttcaaccacttccagattgaaaggatcctgaacaaacctggattgaaacataagccagtgaccaaccaggtcgagtgtcacccatacctcactcaggaaaaactgatcgagtactgtcactccaagggcatcactgtcacagcctacagccctctgggttccccaaataggccttgggccaagccagaagacccttcactcctagaggaccccaagattaaagagattgctgcaaagcacaagawaacctcggcccaggttctgattcgattccacatccagaggaatgtggtggtgatccccaagtctgtgacaccagcacgtatacatgagaactttcaggtctttgacttccagttgagtgatcaggagatggccaccatccttggcttcaacagaaactggagggcctgcctgctgcctgagacagtaaacatggaagaatatccctacgatgcggagtattgaagctaactcgcctgatgaggcttccctctttgctgatgcacacctcaatcatttctggtgtgccatttgagccaagcctgcctgatgtcatgctctaggcaacgctgtacttaaaatcctgtgttcaaggaagtgtgactctgagaagtgaatgtgcatttctttcactgannnnnnnnnnnnnnntgtttgccaaaaatcaggaactctg

SEQ ID NO: 2219 - DNA, 534 bp, Cricetulus griseus
agttcgttgcattcccgaagctgctatagtggacaagggcatttggtcgcttagcgccctccgctcgagtgcccactgccgtcccgtcgagagcccgcgcaggaaccagcacctttgcagacatggagactgtggttcgacgatgcccattcttatctcgagtccctcaggcctttctgcagaaggcaggaaaatctctcttgttctatgctcagaactgccccaagatgatggaagttggggccaagccagcccctcgaaccctgtccacttcagcagcacactgccagcagatcagagaaacccctccagccaatgagaaagaaaaggctgccaaagctgcagtccagcaggctcctgacgaatcccagcagactccagatggcacacagctcccggctggacacccgtcacccactgcaagccagggctctgggagcaagtgccctttcctggctgcacagctgagccagacaggcagcaatgtcttccgcaaggccagtctggagcttcaggaggatgtgcaggatatgc

SEQ ID NO: 2220 - DNA, 507 bp, Cricetulus griseus
gagccgtgcagatcgcgtctctgtctcctctcctgtcgcttgtctcctcttctctcgctcttctctccgcctcgtcaggttcggctaagagtgagtggcaagatggcggcgcccatgtatgccaccctcccggctgtcgggcgttatggtgccagcacccatccaggacttggaggccctgcgcgccctcaccgcgctcttcaaggagtaccgtaaccgggaaacagcacccagaacgatcttccagagagtcttggatatcttaaagaaatctactcacgctgttgagctggcctgcagggacccttcccaagtggagcacctggcttccagtcttcagctaatcacagaatgtttcagatgtcttcggaatgcttgtatagagtgctctgtgaaccagaattcaatcaggaacctggatacaattggcgttgccgttgatttggttcttctctttcgtgaacttcgagtggaacaagactctttgttgacagcttttcgttgtgg

SEQ ID NO: 2221 - DNA, 360 bp, Cricetulus griseus
agtggaggctctttgctgatgtcctcaacgatatagccatgttcttggagattatggctcccatgtaccccatctttttcaccatgactgtcagtatcagcaacctagccaagtgcattgtgggtgtggctggtggggccactcgagcggcactgaccatgcaccaggcccgaagaaacaacatggctgatgtatcatccaaggacagcagccaggagacagtggtgaacctagcaggactcctggtcatccttttgatgcttcctctggtatcagattgcccaagcctcagccttggatgcttcatcctcctgaccgctctccacatctatgccaactaccgggcagtccgagcccttg

SEQ ID NO: 2222 - DNA, 571 bp, Cricetulus griseus
  misc_feature (523)..(537): n is a, c, g, or t
ccagccctgacaaaatgcttcagggtcgcctttttgcttatccggacactcaccgccaccgcctggggcccaactatctccagatacctgtgaactgtccctatcgtgctcgagtggccaactaccagcgggatggccccatgtgcatgcacgacaatcagggtggtgctccaaactactaccccaacagcttcagcgcacctgagcagcagcgctcakccctggagcacaggtcccagtgctccacagatgtgcagcgcttcaacagtgctaatgaagacaacgtcactcargtgcggaatttctatacgaaggtgttaaatgaggaggagaggaaacgcctgtgtgagaacattgctggccacctgaaagatgctcagctgttcattcagaagaaagctgtcaagaatttcactgacgtccaccctgactacggggcccgcatycaggctcttttggammaatataatgccgagaaagcctaagaatgcgattcatacctatacgcaagcgggctctcacnnnnnnnnnnnnnnnaaagctaaccctggaagctcaagggctcaccctg

SEQ ID NO: 2223 - DNA, 463 bp, Cricetulus griseus
  misc_feature (358)..(386): n is a, c, g, or t
taagaaagcccatgagaagttgacagagaggcgccctctgcacactgtggtgttggcattacccgagcgcgtcgagccagacagactgctgagcgactatattgagaaggaggtgaagtatttaggtcagttaacatccatacctggctacctgaacccctccagtaggactgaaatcctgcatttcatagacaaggcaaagcggtcccaccagcttcctggacacctgacccaggagcatgatgctgtgctcagtctgtctgcctacaacgtcaagctggcctggagggacggggaggacatgatccttagggtgcccatccatgacatcgctgctgtctcctatgtcagagatgannnnnnnnnnnnnnnnnnnnnnnnnnnnncccaggacccaggcatctctccgagccaaagtctatgtgcagaaagttctagaggcctcagcgcatgttccttgtca

SEQ ID NO: 2224 - DNA, 556 bp, Cricetulus griseus
tccaggatggcttcggattcccgggacggtgggaccatgtgtgcgctggagtttgcagtgcatatgacctgtcagagctgtgtggacgcggtgcacaagaccctgaaaggggtggcaggtgtgcagagtgtataagtgcaattggagaaccaaatggtgttggtgcagaccactcttcccatccaggaggtgcaagcgctcctggaaagcacaggaaggcaggctgtactcaagggcatgggcagcggccagttacagaatctgggagctgcagtagccattgtggagagctctaacaccatacgtggggtggtccgattcctacagctgacctctgaactctgcctgattgaggggaccattgatggcctggagcctgggctgcatggattccacgtccatcagtatggggatctcacaagggattgcaatagctgtggggaccattttaaccctgatggaacatctcatgggagccctcaggatactgaccggcaccggggagatctcggcaacatcctggctgatgctgatggccgagccaccttccggatag

SEQ ID NO: 2225 - DNA, 364 bp, Cricetulus griseus
catggccgaagaacaacctcaggtcgaactgttmgtgaaggctggcrgtgatggggccaakattgggaactgccccttctcccabaggctgttcatggtgctctggctcaagggagtcaccttmwacgtcaccaccgtggacaccaawagacggacagagacagttcagaaactttgcccgggtggacaactcccattcctgctgtacggcaccgargtrcacacagacaccaacwagatcgaagaattcctggaagctgtgctgtgccctcccaggtacccaaagctggctgctctgaaccctgagtccaatacctcakggctggacatatktgccaagttttcggcctacatcaagaactca

SEQ ID NO: 2226 - DNA, 460 bp, Cricetulus griseus
ttttctgactctagctgccaaatggccatcatatgcttttaatctttgttgccatatctgtctagatttgaattaagctactggtttattcccacagtttgatgcctctagatgttttggaaaccaaccccccctttgttgtcgttggcccagaggggccacttgaaaaatctgacttgagaggcagagagcataaataacattttgtggggagaaaattagttggctgcttgatgttaattatggcacagtaacattggaaaaggttgtgtctgtgtttttaagtttttctttattctgcttttttgctgctataagagttttctgaaatttatattttaaacttttcatgcactttactgtttctagtatcaaaatgtgatatttttaataaacaagaaattttccattatgtgaatgaaattttaaaagaaaatagcctatattttgtggctcacta

SEQ ID NO: 2227 - DNA, 358 bp, Cricetulus griseus
atctttattgccataaagcagagtaactgtgtttgacttggaccttgtttactgtgaactctaatcgaggcaggcgatgcagcatcctcctaatggccatgtggacttgtagatgggtcacttaacccttgcttaagaatccagtttggcttagggtgtgaattgggaatactgttccatgggttgcaatgcagctctactcatgttaccaagcttgctctattgtcaatagcatgcaacatatgttttgtttgcccttctgcttctactttttccagggaagctgctaaagaatgtcgacgtcgaaagaaagaatatgtaaagtgtctggagagtcgagttgcagtgctggaagttc

SEQ ID NO: 2228 - DNA, 396 bp, Cricetulus griseus
gtagctgcagctgaaggagttgaccggccaactgaccmtacattcacctagccaccatggacatcgccatccaccacccctggatccgccgtccctttttccctttccactcccccagccgcctctttgaccagttcttcggagagcacctgttggagtctgacctcttctcaactgccacttctctgagtcccttctacctgcggccaccttccttccttcgggcacccagctggattgacactggactctcagagrtgmgkmtsswswakgrcmswtyctssgtcaacctggatgtgaagcacttctccccggaagagctgaaagtcaaggtgctgggggacgtggttgaagtgcatggcaagcacgaagagcgccaggacgaacacggcttca

SEQ ID NO: 2229 - DNA, 535 bp, Cricetulus griseus
tgcagtcacttctcggcttgctgggacatgataatacagatgtgtccatagccgtggttgatctgcttcaggagctgacagacatagacaccctccatgaaagtgaagaaggggcataatttctcatcgatgctctggtggatgggcaggtggtggcactcctggtgcagaatctggagcgcctggatgaatccgtgagggaagaggccgatggcgtacataacaccttagctattgtggaaaacatggcagagttccgtccagagatgtgcacagaggctgcccagcaggggctcctgcagtggctgttgaagaggctgaaggccaagatgcccttcgatgccaacaagctgtactgcagtgaagtgctggccatcctgctccaggacaatgatgacaacagggagctgctgggggagctggatgggatcgatgtgcttctgcagcagttatccgtgtttaaaagacacaatcccagtacagcggaggagcaggagatgatggagaacctgtttgacgcgctctgctcctgctt

SEQ ID NO: 2230 - DNA, 506 bp, Cricetulus griseus
tccgtctccgggtcgcagcggctgtggagctgatcacctgggagcgaattaaaaatgggcgatgttgagaaaggcaagaagatttttgttcagaagtgtgcccagtgccacactgtggaaaagggaggcaagcataagactggaccaaatctccwtggtctgttcgggaggaagacaggccaggctgctggattctcgtacacagatgccaacaagaacaaaggcatcacttggggagaggataccctgatggagtatttggagaatcccaaaaagtacatccccggaacaaaaatgatcttcgctggaattaagaagaagggagagagggcagacctaatagcttaccttaaaaaggctactaatgagtaattctgatgccttatttattacaaaacaaatgtctcatgacttttaatgtgtattataatttaattcacaccaaaattcagatcatgaatggctaacaatgtttttgttggacagtcctgattaagtaaaacttg

SEQ ID NO: 2231 - DNA, 458 bp, Cricetulus griseus
  misc_feature (44)..(44): n is a, c, g, or t
ccaataatcccaacggcaaggctgaatctcaaggacaatgggangccgggcctggagaagtggattggttctccctagccagtgtcatttttctgctgctctttgcaccattcattgtgtactacttcatcatggcatgtgaccagtacagctgctcgttgaccacccccatagtggacatagccaccggccgtgctagtctggcagacatctgggccaagacaccgcctgtgacagctaaagctgtccaactgtacaccttgtgggtcagcttccaggtggttctttactcctggcttcctgacttctgccatagatttttgccaggctatgtgggaggtgtccaagaaggtgccgtaactccagcaggggttgtaaacaagtatgaggtgaacgggctacaagcctggctcattactcacctcctctggtttttgaatgcttacctactatcctgg

SEQ ID NO: 2232 - DNA, 287 bp, Cricetulus griseus
agaagttagctcagactctgaatctgactctgatgacgaccgaacaaaagaagagcgggcttatgacaaagcaaaacggagaattgagaaacgacgacttgaacatagtaaaaatgtaaatgcagaaaagttaagagctcctatcatctgtgtgcttggacatgtagatacagggaaaacaaaaattctagataagctgcgtcacacacatgtccaagatggtgaagcaggtggtattacacagcagattggtgccacaaatgttcctcttgaagctattaatgaac

SEQ ID NO: 2233 - DNA, 563 bp, Cricetulus griseus
tcgctgcacgtggtcaaggtgctgctggactgcggggccgaccccgacagccgggacttcgacaacaacactccgctgcacatcgctgcccaaaacaactgcccggccatcatggatgcgctaatcgragcaggggcccacatggatgccaccaatgccttcaagaagacagcctatgagctgctggacacaaagctactggccaagagcaccgtgcagcccttcaactatgtgacgctgcagtgcctggccgcccgcgccctggacaggaacaaggtcccttataagggattcatcccakaggagctggaggccttcatccagctgcactgagcccggcccagacacctgcgtgcactttagcctactccaagcgaaagcaccctgtcctcttgggctgcaggcagtgagggtcattggagtgggccccgctgttggttctagaagccttcaaggtcacgtggtaggaagatggcctttctctgtgacaaagcaaaagagtgccaggacctccccagtggcgtctgtctgggtctggagtcctgtgcccacgacacacgtgg

SEQ ID NO: 2234 - DNA, 535 bp, Cricetulus griseus
ccaagcccattcctgggaactggaatggtgcaggctgccataccaactttagyaccaagrccatgcgggaggagaatggtctgaagcacatcraggaggccatygagaaactaagcaagcggcaccggtaccayattcgagcctacgatcccaaggggggsctggacaatgcccgtsgtctgactgggttccacraaacgtccaacatcaacgacttttcwgctggygtcgccratcgcagtgccagcatccgcattccccggactgtcggccaggagaagaaaggttactttgaagmccgcygcccctctgccaattgtgacccctttgcagtgacagaagccatcgtccgcacatgccttctcaatgagactggcgacsagcccttccaatacaaaaactaattagactttgagtgatcttgagcctttcctagttcatcccaccccgccccagctgtctcattgtaactcaaaggatggaatatcaaggtctttttattcctcgtgcccagttaatcttgcttttattggtc

SEQ ID NO: 2235 - DNA, 445 bp, Cricetulus griseus
tcctgtctgtgaaagacttcctggttctcccaccgttttttctcgtctttttatttccagaagccaatgcgagacattggctctgattaagcgacggctcgtgacccggggtgatggagatcacccctgcaaggggtggactgaaccgagcacacctacaatgcaggaatctacaggagttcctagggggcctgagccccggggtgcttgaccgcttgtatgggcacccagccacttgcctggctgtcttcagggagctcccttctttggctaagaattgggtgatgcggatgctttttctggagcagcctttgccacaggctgcggtggccctgtgggtgaagaaagagttcagcaaggctcaggaggaaagcacaggactgctcagtggtctccgaatttggcacacccagctgctccctggtggactccagggcctcatcct

SEQ ID NO: 2236 - DNA, 320 bp, Cricetulus griseus
  misc_feature (146)..(146): n is a, c, g, or t
  misc_feature (181)..(207): n is a, c, g, or t
  misc_feature (293)..(293): n is a, c, g, or t
ccaagcgtcgtctggtgtccccgtgggacccagcccctcccagcgtcccgaatgctcttgaggaggaccagagtgagggcagcaagagctactcagcaacaatgtcttcagaagtggagacctcggaaggggtagatgagtcaganaaaaagaactctgtggccccagagaaggaaaatcnnnnnnnnnnnnnnnnnnnnnnnnnnntcctaaaggaagggaccaaggaagcacacgaccgggcagaaaatacccagtttgtcaaagacttcttgaaaggaaacattaagaangagctattttaagcttgccactaccgc

SEQ ID NO: 2237 - DNA, 575 bp, Cricetulus griseus
tcccactgctagcaagtcctctgagctgcgaaggtcatgctgcccaacaccgggaagctagcgggatgcacgatttttatcacaggtgcaagccgaggcattggcaaagctattgcattgaaagcagcgaaggatggagcaaatattgtcattgctgcgaaaaccacccaaacacacccgaaactcccaggcacaatctacactgctgctgaagaaattgaagcagttggaggaaaggccttgccatgtgttgttgacgtgagagatgaacagcaaatcaacaatgcagtggaaaaagctgtggagaaatttggaggaattgatattttggtgaacaatgcaagtgctattagcttgaccaacacattggatactcctacaaagagagtggacttgatgatgaatgtgaacaccaggggcacctaccttacatccaaagcatgtattccttttttaagaaagagcaaagtagcacatattcttaatctcagcccacccctgaacctaaatcctctgtggctcaaacagcactgtgcttacaccattgccaaatatggcatgtctatccgtgtgct

SEQ ID NO: 2238 - DNA, 766 bp, Cricetulus griseus
cccaagattcagaagcttctgcaagacttcttcaatggaaaagaactgaataagagcattaaccccgatgaagctgttgcttatggtgcagctgtccaggcggccattctatctggagacaagtctgagaatgttcaggatttgttgctcttggatgtcactcctctttcccttggcattgaaactgctggtggagtcatgactgtsctcatcaagcgcaataccaccatccctaccaagcagacgcagactttcactacctattctgacaatcagcctggtgtgctcattcaggtctatgaaggcgaaagggccatgaccaaggataacaacctgcttggaaagtttgaacttacaggcatccctccagcaccccgtggtgttcctcagattgaagttacttttgacattgatgccaatggcatcctcaatgtctctgctgtagataagagcacaggcaaggagaacaagatcactatcaccaacgacaagggccgcttgagcaaggaggatattgaacgcatggtccaggaagctgagaagtacawagctgaagatgagaagcagagagataaggtttcctccaagaattcactggagtcctatgctttcaacatgaaagcaacagttgaagacgagaaacttcaaggcaagatcaatgatgaggacaaacagaagattctagacaagtgtaatgaaatcatcagttggctggataagaatcagactgcagagaaggaagaatttgaacaccagcagaaagaac

SEQ ID NO: 2239 - DNA, 535 bp, Cricetulus griseus
  misc_feature (44)..(58): n is a, c, g, or t
  misc_feature (236)..(236): n is a, c, g, or t
gtggatccagtgaccgtatttgcctcactgtccccagaggtctnnnnnnnnnnnnnnntccccaagtccctccttactcaacctttggagagaacagcttcaatcacgagcttccccaagacaacccggaagtcacctgttcctaagaattcagccttggtccttctttgttcctgtccccagtgccagggggcctctggtttggagggtacatacactactttagcagaactcanatgttgggggatgggagggaaacgagaatgaccacagagtccctggataatgtagtagtagatgtctccacagggtgacacaatggatggccttgcttgattgtgttaggtcacagtattgggaggatgtcccttcatcttgtctagttgaagtcactgtacggtctatagttgcaaaacaagcaaaggaggattgaacacttcatgttacatctttaccttacagctaactcaagggttgtttttctctggggaccgtcccatcacccagatccctgctctaggctctcctaatgtgt

SEQ ID NO: 2240 - DNA, 533 bp, Cricetulus griseus
  misc_feature (256)..(271): n is a, c, g, or t
tcaccaacctgcagttttgtgtcagtgcccaaaggagagaggttgatggtgcttaacagacatgaagtatgtgtagtaagagtatttatccagaattaaaatatagggttgtgtaaaaggcggggagagaagagtagagtgagttggaggaaggccgtgctcccagtgggtcccaktgcagcccatctgcaggtctcgctcakgcaggcgctcacacgtgggtctcaccactgkgacaactatgctttcactgccnnnnnnnnnnnnnnnntcttactgagagccaagggcaacacaaagctatgactgcaccgtgatgctggacttttcacctcaacttaaatgaagttttgtccacggtctggaccatctaagagtgagtagctgtctgctgtttcaktcgtcaggagccgaaattgtttccatcactccagagtggagaggactttcccacakccctatggagcttgcaatctgtgattgccttgtaaaaggttgagtgtgcaggtcactgcattaaacacgcggtgtct

SEQ ID NO: 2241 - DNA, 312 bp, Cricetulus griseus
cttaacgaggccaagcctagcactattgccaccagcatgcgggattccctcattgacagcctcacatgagtcaccttccatgctgctgtgtgggctcctggctctggactttggctcatttaccatgcctgagctagtatgtaccaaacgctggcagcagggcgtggcagagagcttaccagagctgaatggttgagcgcgcccaacccttcttcatccgtgccatctctagactattgttataaaaaggcttgccgtgtcatgctggctttgagttgtggctcctggatgagagttctgctgtcttgtgtc

SEQ ID NO: 2242 - DNA, 538 bp, Cricetulus griseus
  misc_feature (332)..(351): n is a, c, g, or t
  misc_feature (510)..(510): n is a, c, g, or t
aatggcagacggtttttcgcttaatgatgccttagctggttctggaaacccaaaccctcaaggatggcctggtgcataccaacctggggcagggggctacccaggggcttcctatcctggggcctaccctgggcaggctcctccaggggcttatcctgggcaggctcctcctagtgcctacccaggcccaactgcccctggagcttaccctggctcaactgcccctggagcttaccctggcccaactgcacccggagcttaccctggatctgcacctggagccttcccagggcaacctggagcacctggggcctaccccagtgctcctgggnnnnnnnnnnnnnnnnnnnnctatggcgcccccactggagcattgacagtgccctataagctgcccttggctggaggagtcatgcctcgaatgctgattacaatcatgggcacagtgaagcccaatgcaaacaggattattctaaatttcatgagagggaatgacattgccttccactntaaccctcgcttcaatgaaaacaacagg

SEQ ID NO: 2243 - DNA, 494 bp, Cricetulus griseus
tgggcaacactgatgggctgcccagggtgcagctgtcttctcctgggcagctcttcacagcactggagagagactcggtccagctgtgtacgtgggttggggaactcttcctggaactacacaatggcacctacactacccatgcccagctcaagaagaggaatcgggaatgtgagcaaatccttcatgacgtggagatgctgagcagcctggccctagcccgcagtgcccacttcctatacccagcagcccagttgcagcacctctggagactcctactcctcaaccagtttcatgatgtgttgactggaagctgcattcagctggtggcagaagatgccatgaactactatgaagacatccattcccatggcaatacgctgctcaatgctgcagccgcagccttatgtgctggggagccaggtcctaagggcctcctcgttatcaacacgctgccctggaagcgcactgaagtgttggcactgcccaagcct

SEQ ID NO: 2244 - DNA, 534 bp, Cricetulus griseus
ttgctctgcgcttccccggagtgaggcttctcggctcgccggctcccgtcgcaggtccccggcagcgatggcgctcaaggactacgcgatcgagaaagaaaaagttagaaaattcctgcaagagttttattatgatgatgaactcggaaagaagcagttcaagtatggaacccagttggttcatctggctcatcgggaacaagtggcattgtacgtggacctagatgatgttgctgaagatgaccctgagctggtcgactcaatttgtgagaatgccaaacgctactcaaagctgtttgctgatgttgtacaagagcttctgcctgagtacaaggagaaggaggtggtgaataaagatgttctggatgtttacattgagcaccgactgatgatggagcagcggagcagagaccctggggcagtccggaaccctcaaaatcaatatccttctgagctgatgcgtagatttgagttgtatttccaaggcccaagtagcagcaagcctcgagtgatccgagaagtgcgggctgattc

SEQ ID NO: 2245 - DNA, 857 bp, Cricetulus griseus
caatctgctgaagaagacaactttaagaagccaactcgaagcaacatgcagagaagtaagatgaggggagctgcctcaggaaagaagtcggctggttcacagccaaagaatcttgaaccagccctcccaggaagatggggcggtcgctctgctgagaaccccccttctggttctgcgcggaagaccaggaagaacaagcagaagattcctggcaacggagatggtggcagtaccagcgaagtgccccagcccccccggaagaaacgggcacgggctgaccccactgtggagagtgaggaagcattcaagaatagaatggaagtgaaagtgaagattcccgaagagctaaaaccatggctggtggaggactgggacttggttaccaggcagaagcagttgttccagctccctgctaaaaagaatgtagatgccattcttgaggagtatgccaattgtaagaaatcacagggaaacgttgataataaggagtatgcggttaatgaagttgtgggagggataaaagagtatttcaatgtgatgctgggcactcagctgctctacaagtttgagcggccccaatatgccgaaatccttctggcacacccagatgcgccratgtcgcakatctatggggcgccacacctactgagattatttgtgagaattggggcaatgttggcctatacgccccttgatgagaaaagcctggcattattgttgggctatttgcatgatttccttaaatatctggcaaagaattctgcctctctgttcactgccagtgattacaaagtggcttctgctgactaccatcgcaaagccctgtgaaggkctactgaccactcactatcgtctgg

SEQ ID NO: 2246 - DNA, 500 bp, Cricetulus griseus
tagggtgtccctgaacctggcccggagcttccgaacggccagaccgcggctcgctgcagtcgcgtcagatacctcctgtgtccgcacgggatcgagccggcttcagagcaccgggccttccgaacccggtgggttcaagccacctccgaaacctgtcttggaggaccggcgccgagccgcggacgaaagtacaaggttcctgagtcccgaattcattcctccaaggggaagaacaaaccctctgaaatttcagctagaaagaaaagatatgctagccaggaggaaggtgcttcacattccagagttctatgttggaagcatactgcgtgtcacctcagctgaccggtatgccagtggaaaaaccatccagatcctggggatttgcatccagcggtcaagaaaagggcttggagctactttcacccttaggaacattattgaaggacaaggtgtggagatttgctttgaactgtataatcctcgaatccacgagatccaag

SEQ ID NO: 2247 - DNA, 656 bp, Cricetulus griseus
ctccggaagcggaaacgcactcgaggtcaggcgtgctcccaagatggcggccctcagggctctggtgtcaggctgcgggcggcagcttcaggggttcctcgcaggccccgccgcgaccggctggttaaggcttccagctcgtgggttgagagaagtggtggagatccaagaagggaagacaactgtaattgaaggtcgaatcacagaaactcccaaggcaactccrartscccctaacccctcaggccagtgccccatctgccgttggaacctgaagcacaaatataactatgaggatgtgctgctgctcagtcagttcatccggcctcatggaggcgtgctgccccgcaatgtcacaggcttgtgcctggaagaacaccgaaagatcgaggagtgtgtaaagatggctcatcgagcaggtctattcccaaatcacaggccacggcttccagaagggtccttacctakgaataaacccaaactcaaccgctacctgactcgctgggctcccagctctgtcaagcccatctacaaaaaaggtcaccgttggaacaaagtgggtatggccgtggggtcaccactcctcaaggacaatgtctgctactccaggagacctttgaagctctttcattaatgggagccctgcagctgaagac

SEQ ID NO: 2248 - DNA, 110 bp, Cricetulus griseus
  misc_feature (80)..(80): n is a, c, g, or t
attttgactacaaagatgaatctgggtttccaaagcccccatcttataatgtggctacaacactgcccagttatgatgangctgagagaaccaagactgaagccacgatc

SEQ ID NO: 2249 - DNA, 476 bp, Cricetulus griseus
tgtgagtcccctgatgtcctggacagacaccagaccatggaggtgtcttgctaagcagatgctcccctggaccatgcaagtccctcctccttgaaatgaccactccataatagaacatttcatcctgcccgctggcctccactttcaccccatgcatggccacagaacctttctctaatagcctggatttaccattctctccacacacccctttttgtatataccaagaaccacacccatgccattactgtaacattccaacatcttgatccgatctgatctccatatcttctcttgccagcctttccctattctccctcaaatatgtatctgatgagactctttgattcctaactccatgtgtgtgcgagcacgcgtgtctgtgtctgtgtgtgcatagttctgtgattttagacatgctttcttgtagcgcttctacaaagggatttttttgcattctcagtggcgtttttaag

SEQ ID NO: 2250 - DNA, 537 bp, Cricetulus griseus
gtcaacctggtgatgagctgtggcatttctgtggagttctgcagccatataacaagagcattcaccatgagtaccaaaggaagccgagtaagccgagcagaagaggcgctggcccacatgggtagttctgtattcagcggaatcacacttacaaaatttggagggattgtggtgttggcctttgctaaatctcaaatttttgagatattttactttaggatgtacttagccattgtcttactcggagccactcacggactgatatttcttcctgtcttactcagctacgtaggaccatcggtaaataaagctaaaagacacaccactcaagagcgatacaaagggaccgagcgagaacggctcctcaatttttagccttgtagcaggctttggtgactttgtctatggagaggtcaagtttctgcaggaaagctgtactgtcaaggccatgctggattctggttgttcctaggcattaggctgtgtcacagctgtggcaaatgcagctccacccacgtttttaaactcaggaatgca

SEQ ID NO: 2251 - DNA, 502 bp, Cricetulus griseus
gatacctgtctttcctggtaccatcttccttagtagatcatttatatctcttgcctgatgagcaccttttgacagaggatgaaacaaccatatcagatgatgctgatgtggcccgggatgtcatatgtcttataaaatgcctccggatgattggagagtcagttaccatggatatggcagttttgatggaaaccagttgttacaacttacagtctccagaaaaggctgcagagcaaattttggaagatttgatcactattgatgtagaaaatgtgatggaagacatttgtagtaaactgcaagagatcagaaaccctgtccatgccattggacttcttatacgggaaatggattatgaaacagaagtcgaaatggaaaagggatttgatccagctcaacctttgaatgttcgaatgaatctttcccagctctatggtagtagcacagcagggtatattgcgtgcagaggtgtgtataaaattgccagcactcgtttcctgat

SEQ ID NO: 2252 - DNA, 570 bp, Cricetulus griseus
gcatgacttcctgaagctccttcacattgacaagagaagagagtacctttatcaactccaggagtttttggtgacagataacagtaggaattggcgctttcgtgctgaattggcagaacagctgattttacttctagaattgtatagtcccagagatgtttatgattacctgcgtcctattgctctgaatctgtgtgcagacaaggtctcttcagtccgttggatttcctacaagttggtcagtgaaatggtgaagaaactccacacagcaacacccccaacatttggagtagacctcatcaatgagctggtggagaatttcggcaggtgtccgatatggtctggtcggcaagcgttcgtctttgtgtgccagactgtcattgaagacgactgcctccccatggacgagtttgctgtgcacctgatgccacatttgctgaccttggcaaatgatagggttccaaatgtcagattgctgcttgcaaaaacactgcgccagactctactagagaaagactacttcctggcctctgtcaactgtcatcatgaggctcgggagcacaccatgat

SEQ ID NO: 2253 - DNA, 563 bp, Cricetulus griseus
aagcactatggtttgtgtggacaacagtgaatacatgcggaatggagacttccttcccacccggctgcaggcccagcaggatgccgtcaatattgtatgtcactcaaagacccgaagcaaccctgagaataacgtgggcctcatcacactggccaatgactgtgaagtgctgaccacactcacccctgacactggccgcatcctctccaagctccatactgtccaacccaagggcaagatcaccttctgcaccggcattcgagtggcccatctggctctgaagcaccggcagggcaagaatcacaagatgagaatcatcgccttcgtgggtagccctgtggaggacaacgagaaggatctggtgaaactagccaaacscctcaagawagaaaaagtgaatgttgacatcatcaattttggggaggaggaggtgaacacagagaagctgactgcctttgtgaacacactgaatggcaaggacggaaccggatcacatctggtgacagtgcctcccgggcctagcttggctgatgccctcatcagttctcctattctggctggtg

SEQ ID NO: 2254 - DNA, 405 bp, Cricetulus griseus
  misc_feature (315)..(315): n is a, c, g, or t
tctttcttctgagagatgtgaccagttcgaattatgtcccggaacataaagccagtgccagcaccagccggtctgcttcctctacagacgccaggtgactcccaatttacaagtagaatggccatagcctgtacctccctggcagctggctggttctggtggcactgagatgaacccactctctcgtcatggggaaggggacactgggacagcaggctgccactgagcacacacattcctcccatttttcagaagtgaatgtttcatgtttaggtgccgaatgtgaatttgggtggggagagcaggagcccttcncatagatgggtttacagaggttgtgggaactgagatctgatccctcgaaactgatcttgtgtcacttccaaagaatcatgggcttttttg

SEQ ID NO: 2255 - DNA, 561 bp, Cricetulus griseus
ctctcagaagagaccgatagtggagttctctttagaggatcgaaggaaacttaaagtaaaggagctgaggatccaacgcagcctgcaaaaaatgtcatctaagcctgtaaccggtaagccccaaaaggagcaaaaagaacatgggaaagacaagcaacagaaagcagtgaggcctacacagaatcccagccaggcttctggagagcagaaagggaaggcccgccccacctcgtggacagggttccagaccaaggctgaagtggagcaggtggagctgcctgatgggaagaagagaagaaaggtcctggcactcccttcacaccgaggccccaaaattaggttgcgggacaaaggcaaagtgaagtcccttcctcctaagaagtcaaagccccagacaggccagcggaaacagaagcagcagcagttaccttctttgcaggcacctaagaagaaagctaaggaaaataaggcagaagcccacttcaaccaactggttgaacagtataagcagaaattgttgggtccttctaaaggaccaccccttatgaagagaagcaagtg

SEQ ID NO: 2256 - DNA, 1120 bp, Cricetulus griseus
cttccagtggagtccagaagagggaggaggcactgcctccactccagcagctatacacacaatgcagagcatcaagtgtgtggtggtgggtgatggggctgtgggcaagacatgccttctcatctgctatacgactaatgccttccccaaggaatacatccccactgtgttcgacaattacagcgcccagagtgcagttgacggacgcacagtgaacctgaacctgtgggacactgcgggccaggaagaatatgaccgcctccgcaccctttcctaccctcagaccaatgtctttgtcatctgtttctccattgccagtccaccctcctatgaaaatgtgaggcacaagtggcatccagaggtgtgtcaccactgcccagatgtgcctatcctcctggtaggcaccaagaaggacctgagagctcagcctgataccctacgacgcctcaaggagcagggtcaagcgcccatcacaccgcagcagggccaggcactggccaagcagattcatgctgtgcgctacctcgagtgctcagcactgcagcaggacggcgtcaaggaggtgtttgctgaggctgtccgggcagtgctcaacccaacaccgataaagcgtgggcggtcctgcatcctcttgtgaccctggcactcagcttggagcctaccccttgttcccccaccagttgtgccttggcgccttgtctgctcccagctgtgccttaaggacaattctggcaccccatgccagggggactccctgaatgccttttattccttaaggaggtcacacagggaaaggggctttgggcccaccccactctggcttgaggaatatcccataggcacttccaagaggtcacctaagccaagtcgacctttccaagaggccaacccagtgctgccttccatttcctgctactgaccagttcatccagctttccacaaagttgttgctgcctattgtggtgcctcctctcaggttaagggctctaacctctctgcctttgctcttggagtaggctctccaagatattctctccctcccccaagggggagagccacaaaaccctgagaagaaaaatgccctaacctgccccatgtgcccaggcctgatacgtctgct

SEQ ID NO: 2257 - DNA, 546 bp, Cricetulus griseus
caggtctatcatatggtttgacagattttttaaaagttatttttggtaaggtcttcttttagaaaaaaatctcaagggttttttgtaccactataatctctaatactcagaattgcggtgtatttacttaatttcttattatgtgccttattatgtgcttaagatataatagattagagttttatctaaatatctagaaagataaattgtgggcttgaagagcattctgttattttttccttgtcttggattttaagggttccctccccttttttcatttcaattttaagtggttttcaataagtaatagtttttattcacatttttggtgctttggtgtacagatgggatagagaagggtgagtggtttgggaataacttggtgtgcacctgtaagcctctgttgtgactgctggttgcctccatcctttatgtaaagtagaagctgcagaactgtcttagttcgcatctgtctgacatttaccagctgtcacgatttgtctcaggattacttggttctttctcagcactcaagtgagaacttga

SEQ ID NO: 2258 - DNA, 453 bp, Cricetulus griseus
tcagcgcggtgcaacgcgacttccttcctgcagctgagcgatcggggttgttcaggacaaggaggtgtgaacagactcctgggctggctgatccatcatggcggaaaaagtgaacaacttcccaccattgcccaaattcatcccgctgaagccatgtttctaccaagacttcgaggcagacatccctcctcagcatctcagcttgaccaagcgcctctactacctctggatgttgaacagcgtcacgctggccgtgaacctggtgggctgtctcgcgtggctgatcggaggcgggggagccaccaactttggcctcgcctttctctggctcatcctcttcacaccttgctcctacgtctgctggtttcggcccatttacaaggccttcaagacagacagctccttcagcttcatggccttcttcttcaccttcatggcccagttggtcatcag

SEQ ID NO: 2259 - DNA, 1352 bp, Cricetulus griseus
  misc_feature (47)..(48): n is a, c, g, or t
  misc_feature (897)..(915): n is a, c, g, or t
  misc_feature (1156)..(1172): n is a, c, g, or t
gcacatgtttcctctagtttctctgttcagagccccaggcgactttnnttctggggtaaggcaagtcagttgactggggtccytcacctcgcttcccyaatctacattygggcracmgcatcggggtcacttaagactttctgtttttgtttttaacctagaagaaccaaatcckgatgccaaaacgtargcttagyttgtgtgttgtctctaagtttgtcgctcatgcgtgcaacagggtatagactattctgtatggtgccccatttttttggtgattcataagtaggctggctagtccaggacgccatggggtagccacctcctgaccagtcatgcctgtgtgcataaactcagggccatgaccgtggcctgggccactgtgacatcagaagagcctgtgtgagaacttaactcctatagcacagtctagggatggaggggaagaagactgtggggtgggggaggggtggcaaggatgcccaagactctcctgcctttggtaccatctctggtcacctttctcccggaagttgacaagacacatcttgagtacagctggcgctggctcctccaagaaccaagttcaccttcagctcctgcggccctgccccaggctggagtcagaaatgcttcccaaagactgagagtcttttgcttttggcaaaacgctacttaatccaatgggttctgtacagtagattttgcagatgtaataaaccttaatataaaggagtcctatgaactctactgctttcgtttcttctctgggctggtggtgtagatatagccagccttctctcaaaccctggtagctcagggaagcttggctcaaggctgcgtgcctccaattgtattctctgaggggtaggatcctgggtccaggattcctcttannnnnnnnnnnnnnnnnnntgttttcttttggccaaacttcttttgaaagttggtaggatcagccaaggttttacagggcctgatgtctgctcttgtaaataagtggtataagtaactgggactctagcataacttgacctggggccaccagagtcacacttggtttgcagagcagacacctgggacagcgttcctcccgtgtgtttgccgggacacttttccgaggactccttgcttatttagcacaacaatgttccannnnnnnnnnnnnnnnnccgttggcccagctagacaagagacctgtgccccgtgttccatcccagaacttgttgccagcatataatggctggcggggggtggggtgggggtggggtcagatctgagacagcttgtgagaccctcaggctgggcccattcgtgtaattgcaataaatggtacgtgtccatttggacag

SEQ ID NO: 2260 - DNA, 363 bp, Cricetulus griseus
ccaaaccagtagagactccacctgaacaaaatggcagcattgccccgcagcccaacagcagattgaaggaagctataaatacaagtaaagatcaggaaagcaagtaccaagccagccacccaaatctcagaaggctgcatgatgaagacccaacccccaaagggcctgcttctgctgtgactgctgaggtttacccaaagaactcaagtcttcgagcctatcatcaaaagatcgacaacaacctagatgagctgtccatgggattgggccgactcaaggacatagccttaggaatgcagacggaaattgaggagcaggatgacattcttgaccggctaacaaccaaagtggacaagttagatg

SEQ ID NO: 2261 - DNA, 335 bp, Cricetulus griseus
aattcaaacttgagccacatgatgatcaagtttttctggatggaaatgaggtttatgtgtggatctatgacccagttcacattaaaacatttgtcatgggattaattcttgttattgcagtaatagcagccaccctcttccctctctggccagcagaaatgagagtaggtgtatattacctcagtgtgggcgcatgctgttttgtagccagcattcttctccttgctattgctcgctgtattctgttcctcatcatctggctgataactggaagaaggcacctcttctggttcttgccaaacctgactgctgatgtgggcttcatcgactccttc

SEQ ID NO: 2262 - DNA, 527 bp, Cricetulus griseus
  misc_feature (119)..(148): n is a, c, g, or t
tggtctggtgtacaactgctcacaggcaggggctgtctcacacacaccggaatgtactacgggtactacagcaacaccacgctgagccagtcatgcgcctcccctcgagaaactggccnnnnnnnnnnnnnnnnnnnnnnnnnnnnnncctacctcttcacggtgggcgccgccttcttcattacctgcatcactctggtgtacagcatgtcccactcctttggggagagctaccgggttggcagcaccaaaggcatccatgctcttacggtcttctgctcctgggactacaaggtgactcagaagcgggcctcccgtgtccagcaggacagcatctgtactcagctgaaggagctgctggctgaatggcaacttcgagagaggccccagagcgcatgtgggcagctgtggcaggctgccatgctaagcctgggatggttgctgtgtctgggcaccacgatgggctgtgcagcggctgttcttaccttctcagaggtcatgattcatagaccggatgctgatggcca

SEQ ID NO: 2263 - DNA, 591 bp, Cricetulus griseus
gaagaaacagccactgtgcctcatggattctatgctctcccrsrggcattgtggggtgatgctccctgggtgccaagccctattctargtactgtgaacagcmaakagctggctwggggtgggggataccttgctggctgagytgccacagtgycatatrctsccakgccakcatscasgctggkcacatwwcwtaccwvasytkgccttstggggctaggtttctgttcacaggacagtcctcttcattggtgccccakatgccttgtatcttgcactttaaacaaagggagcatctctgtgccaaagaccaaaggcctcactcaccctgtgcctcatgaccacaagtcaggcaagactggaattgtgccacttgcatccaccccttcaggcaggaaaacctgcttgaaggcttggcccaagagtcaagacaaaaggatgagactccaaagaagccaacatccacctcaaggaatgaggggtcaagtcccttcaccctggtggcctctaattggagctccacagttggagaggaaaagaccagatatggatgggcctaatgccatacagaaaatctcaagccctgttatg

SEQ ID NO: 2264 - DNA, 499 bp, Cricetulus griseus
  misc_feature (213)..(213): n is a, c, g, or t
  misc_feature (231)..(253): n is a, c, g, or t
gttcttggccaaagcaccagggggaggaaagaagagggacattacatccaattgccacccatctccccactgccgtggccacgccctctctcagcactgtcccttcatctctatttcttgttgtagcttctcaccctcctgctcatttcctctggcatctcctgctctgaagaccaaatgactccctccttcctaagcacccatttgtcttanctccatgttctctgttgnnnnnnnnnnnnnnnnnnnnnnntttctggttcaggtgttatgcagtgctcccaggtattgagggagaccatcagtgacacttgaagcaatttttgctgttctcaaatttaaggttccctttacctgaaaccactctattgcctaccttccctggcttcttaagctcacttttcctcccccaccagagttaaatatctgaaagaagcagggatgaacagtttccatggctgtgtgagtttgtgttctggagtgctggtggaatcatctc

SEQ ID NO: 2265 - DNA, 170 bp, Cricetulus griseus
actggctatacccctctcaccacggaccagtcagtggccagtgtgaggaagacaaccgtcttggatgtcatgaggcgactgctacagcccaagaacgtgatggtgtccacaggccgggaccgtcagaccaaccactgctacatcgccatcctcaacatcatccaggggga

SEQ ID NO: 2266 - DNA, 501 bp, Cricetulus griseus
  misc_feature (325)..(341): n is a, c, g, or t
cgcgtgcgctcaaatatttcgcaatggaatgatgatgaagagagaatacaggggccagcgatcagtgaaagcgctcgcagactacatcaggcaacagaaaagtaacccagttcaagagattcaaagtatagatgaagtcaccactcttgatcgcagtaagagacatatcattggatactttgagcagaaggattcagataattacagagtttttgaaagagtagcaagtattttgcatgatgactgtgccttcctttctgcttttggagatgtttcaaaaccagaaaggtacagtggagacaatttaatctacaaaccaccaggnnnnnnnnnnnnnnnnntggtatacttgggatctatgacaaattttgatgtaacttacaactggattcaagacaaatgtgtccctctggtccgagaaataacatttgaaaatggagaggaattgacagaagaaggactgccttttctcatactcttccacatgaaagaggatacaga

SEQ ID NO: 2267 - DNA, 506 bp, Cricetulus griseus
cgaggctgctgaacgcaggttccgcggtatggcggggacggcgctgaagaggctgatggccgagtataagcaattaaccctgaatcctccagaaggaattgtggcaggccccatgaatgaagagaatttttttgaatgggaggcattgatcatgggccctgaagacacttgctttgagtttggtgtttttcctgccatcctgagtttcccacttgactaccccttgagtcctcccaagatgagattcacctgcgagatgttccatcccaacatctatcctgacgggagagtctgcatctccatcttgcatgccccaggcgatgatcccatgggctatgagagcagtgccgagcggtggagccctgtgcagagcgtcgagaagatcctgctttcggtggtgagcatgctggcagagcccaatgatgagagtggagcgaatgtggatgcttccaagatgtggcgggatgaccgtgagcagttctacaaaatcgccaagcagatcgtac

SEQ ID NO: 2268 - DNA, 155 bp, Cricetulus griseus
acccacgcgggggggactgatgagtttgctaaaggaagaaaagtggcagatctctatgaacttgtacagtatgctggaaacattattccaaggctttatctgttgatcacagttggagttgtatatgtcaagtcatttcctcaatccaggaaaga

SEQ ID NO: 2269 - DNA, 252 bp, Cricetulus griseus
gtctgggaacgagcacctccaaccatgtgacctgaaacttgccatctgcccctgtgtgagcttcacgcccgccccctggatgcactaagatttgctcttgtttggtcctggtctggacgcaaaacaaggagatggtkatttaaagagaaatccctatttatttgacacacaaaaaatccagttaatatattaatgtgaaataaacccagtttgcaccttgatttgtttgctacaactgtgaaacagtaaatg

SEQ ID NO: 2270 - DNA, 545 bp, Cricetulus griseus
cttcccctggacagaaggcaaagttggtgtatgaagaagagtcttctgaagaggagtctgatgatgaaattgcagaaaaggattccgatgataattgggatgaagacgaagaagagaaagacagtgaaaaggatgagggagttgatgaagacaatgaagaagatgmggacmcwsrcgwtmmrgaagaraatggggaggacagaratgggtcaagtggaaaaaraattaaatggrrattctgattttaratcctcgaaaatggaaagtggaagaaragtgaagacaagcagccagtcacactgtggaacacctggctcatyttgcccartgctkccgcatcctcccagggaggctcgccctgtgccaggagacaarargccgycatatgcttccaagttcacagaggcsacaccaccttcctgtcctgagtgccccagactttaactgtgtaaataagagwgkktcattcaaatgttaataaactttacacagyaaatagatacactttgccatgtactgacctgagtgtccaatatatggtatat

SEQ ID NO: 2271 - DNA, 431 bp, Cricetulus griseus
tccccgtgtgtctcttggtgttggggatggcgggatccgggaaaactacctttgtacagaggctcacaggacacctccacaacaaacgcttcccaccctacgtcatcaacctggaccctgctgtgcatgaagtccccttccccgccaatattgatatccgtgacacagtgaagtataaagaagtcatgaaacaatatggactcgggccaaatggtggcatagtgacctcactcaatctctttgctaccagatttgatcaggtgatgaagtttatcgagaaggcccagaacacattcaaatatgtcctgattgacacacccggacagattgaagtgttcacctggtcagcttctgggacaatcatcactgaggccctggcatcctcatttccaacagtggtcatctatgtaatggacacatcacgaagtact

SEQ ID NO: 2272 - DNA, 547 bp, Cricetulus griseus
tgtgcggcctgctggcgctactctggaaagacccaagactctctctcctgggaagaatggggtcgtcaaagacgtctttacctttgggggtgctgtggagaaccccgagtacctagtacccagaggaggctctgcttctcaaccccatcctcccgccttgtgcccagcctttgacaacctctattactgggaccaggacccatcagagcgggggtctccaccaaatacctttgaagggacccctacagcagagaaccccgagtacttgggcctggatgtgcccgtgtgacgtcacgtttgtagaggccctgttctgccttcagagtgagggaggcctggtctccttcaccccaaagcagggggaggtcctctggccacattatttccagggcagcctgcttgccaggagcccaccctgcggaaccttccttgctgcttgagtcctgagtggttgacaggggccccctggttggaagaggtggcacactgaacagcctcattggatcacagaccctgccctgacaccctgtagggtccaggggcatca

SEQ ID NO: 2273 - DNA, 539 bp, Cricetulus griseus
ctccagcaaaatggttaggcagattttagagctttgtcctaacctggaacatctggatcttacccagactgatatttctgattctgcatttgacagttggtcttggcttggttgctgccagaatcttcggcatcttgatctgtctggatgtgaaaaaatcacagacatggctctagagaagatttctagagctcttggagttctgacatctcatcagagtggctttttgaaaagtgcaggcaaggccaattcagctccatggataaataaagacattaccatgcaatcctccaagcagtatgcctgcttgcacaatttaactgacaaaggtgttggtgaaaaaatagacaatgatcactcttggactaaacctgtatcttctgaaagttttacttctccttacgtgtggatgctagatgctgaagatttggctgatatcgaagatgctgtagagtggagacacagaaatgtcgaaagtctctgtgtaatggaaacagcctccaactttggttgttcttcatctgggtgttacaatatgg

SEQ ID NO: 2274 - DNA, 572 bp, Cricetulus griseus
gaggcctgaacctcaccgaggacacctaccagccccgactttacacctcctcaacctggagcaccttggtgacagagagttcctcgaggtcacgggcggcggtgcaagtgtatgggtatgcgcagtactatccatatggctatgattcaaggcggtggtactacccctaccagtccttccagaccccgcaacaccccagctttctcttcgtggacaagctgatctcctggtcagccacctacctccccactgtccagagctgctggaactacggcttctcttgcacccccgaggagctccccgtgctgggcctcaccaagtccagctactccgagcctgccatcggctatgaaaacaaagcgctgatgctctgcggagggtacagtgtggtggatgtcgccaacttcgcaggctctaaggctcctatccccagtgctctggataccaatagttccaagatttcgtctctctttccctgcagctcgggggccttcagcggcttccgcgtggtcatccgccccttctacctgactaactccactgacctggactaggtgggtccatctcactgg

SEQ ID NO: 2275 - DNA, 400 bp, Cricetulus griseus
ctttgagactttgtttacgtgtggcagtgttgtaaaaagaaactaaagatcacattttacctgtatggatgaatttcccttttcttcttcaagtgcagtttgtgacgtgttctgttattccagatctgaaagttacaggtgatattgggagttgacagcatttgcttgagtttattcaattccattaggccttcacatgtgttaatctcatttccaacattgaattgcggcggtaacattttcctttctgtgaagtcctaaacttagttatgacctccttagcaatgcctttgaaaggggatattgcgtccatggtaaattaattgtatacctaaacagatatagctcagctttgcctggcaggcttggcattgacatctggtagacttctgcacatgta

SEQ ID NO: 2276 - DNA, 551 bp, Cricetulus griseus
taagtccctacattctgctgggcccccactcctcgctgtatcagcagctcctccttctcagccccttgccaagaaaaaaggcgttaaacggaaagcagacaccaccacccctacacctacagccatgctggctcctggctccccagctagtccccctgggagtcttgagccaaaggcagcccggcttcctcctatgcgtagagagagtggccgtccaatcaaacccccacggaaagacttgcctgactcacagcagcaacatcagagctctaagaaaggcaagctgtcggaacagctgaagcactgcaacggtatcttgaaggagctgctctctaagaagcacgctgcctatgcctggcccttctataaacccgtggacgcttctgccctcggcctccacgactaccacgacatcattaagcaccccatggacctcagcactgtcaagcggaagatggagaatcgtgattaccgggacgcacaggagttcgctgctgacgtgcggctcatgttctccaactgctataagtacaatcctcctgaccatgatg

SEQ ID NO: 2277 - DNA, 540 bp, Cricetulus griseus
  misc_feature (254)..(300): n is a, c, g, or t
cggctaggtgctgcatccctcaagttcggggccagggacgccgccgcccaggagcccaagtaccagctggtgctggaggaggacgagaccatcgagttcgtccgagccgctcagctgcagggagacgaggagccgtcgtcagttccacccccatcagcccaggcccagcagaaggagtccatccaggctgtccgccgcagcctgcccgtgttccccttccgagaggagctcctggccgccatcgccagccaccnnnnnnnnnnnnnnnnnnnnnnnnnnnnnnnnnnnnnnnnnnnnnnnatcccgcagtacctcttcgaggagggctacacaaagaagggtatgaagattgcttgtacccagccccgaagagtggcggccatgagcgtggctgccagagtggcccgggagatgggtgtgaagcttgggaatgaggttggctacagcatccgctttgaggactgcacatcagagcgaaccgttctccgctacatgacggatgggatgctgctacgggagttcctctctgaacccgacctt

SEQ ID NO: 2278 - DNA, 555 bp, Cricetulus griseus
aagcatactgagagccggcatggccgacaatcctgtgttggagctgttgttgcggcgactggaggcagcggatggcggcctggacagcgcggagttggctacgcagctgggcgtggagcaccaggtggtggtgggcgcagtgaagagcctgcaggctctgggtgaggtcattgaggctgagcttcgttccaccaagtgctgggagctgactactgagggtgaggagattgcccgggagggcagccatgaggcccgtgtgtttagaagcatccctctcgagggcctggtgcagagtgagctcatgcgactgcccagtggcaaggtgggcttcagcaaagccatgtccaacaagtggatccgagtggacaagaatacagctgatgggccccgggtgttccaagtggtggacagtatagaggatgaagtacagaggcggttgcagctggtccatgcaggccaggctgagaagctggctgaaaaggaaaggaatgagctccggaagaggaagctgctaactgaagtgaccctgaaaacctactgggtgagcaagggcaa

SEQ ID NO: 2279 - DNA, 557 bp, Cricetulus griseus
  misc_feature (143)..(211): n is a, c, g, or t
tgggcatgttctaccgcaccatccgcatgatggagaatggcatcaagcctgtgtatgtctttgacggcaagccaccacagctgaagtcaggcgagctggccaaacgcagtgagaggcgagctgaagctgaaaagcagctgcannnnnnnnnnnnnnnnnnnnnnnnnnnnnnnnnnnnnnnnnnnnnnnnnnnnnnnnnnnnnnnnnnnnngcaacacaatgatgagtgcaaacacctgctgagtctcatgggcatcccgtaccttgacgcacccagtgaggcagaggccagctgcgctgccctggtgaaggctggcaaagtttatgccgcagccaccgaggacatggactgcctcacttttggcagccctgtactaatgcgacatctgactgccagtgaggccaagaagctgcccatccaagagttccacctgagccgcgtcctgcaggagctgggtctgaaccaggagcagtttgtagatctctgcatcctgctgggtagtgactactgtgagagtatccggggcatcgggcccaagcgggctgtggacctcatc

SEQ ID NO: 2280 - DNA, 333 bp, Cricetulus griseus
catacctccaagatggaaagcaaacagggaacctgaaaaacctgctctgtggatgtgggttctggagtcatcakcwagaccctcacatatcccctggaccksttcaaraarcgtytgcargtgggagggtttgagcgtgcccgatccgcctttggcgargwgcgtarctacargggcctcctggacctcaccaakcaggtgctacaagatgaakgcacccakggcctcttcaagggcctgtcccccarcctgctgaargcggscctctmcaccggcttcatgttcttctggtacgagctcttctgtaacctcttccactgcataaggagtgaa

SEQ ID NO: 2281 - DNA, 244 bp, Cricetulus griseus
aggctctccgtacagactacaatgccagtgtttcagtcccagacagcagtggccccgagcgcatactgagtatcagtgctgatattgaaacgattggagagattctgatgaaaatcatccctaccttggaagagggcctgcagttgccatcacccactgcaaccagccagctcccgctcgaatctgatgctgtggaatgcttaaataccaacactataaaggaagcgactttgactgcgagttg

SEQ ID NO: 2282 - DNA, 544 bp, Cricetulus griseus
  misc_feature (217)..(240): n is a, c, g, or t
gccactgtcctcaattgcttccatgatatcttgtcagggaagctgagaggtggctctcctggggtccccgtgaacggactcatttcagaagagaatgtgagtctccttgctgcagctctgcggatacagaacatgatcagcagtggcaggagatggctccgagagcagcagcacaggaggtggcgacttcactgcttgaaactgcaacccctctccnnnnnnnnnnnnnnnnnnnnnnnntcaaggagacagactccaaaagctgtggatgtccttgccaaggagataggattgcttgcagatgaaattgaaatctatggcaagaccaaagccaaagtccgtttgtccctgctggagaggttaaaggatcaaaaagatggaaaatacgtcttggttgctgggatcacgcccaccccacttggagaagggaagagtacagtcaccatcggactggtacaggcactgacagcccacctgaacgtcaactcctttgcctgtctgaggcaaccttcccacggacccactttcggagtgaaaggaggag

SEQ ID NO: 2283 - DNA, 553 bp, Cricetulus griseus
tgaagctgcgctaccccatcaacgaggaagcactagagaagattgggacagaacccgattatggggcactctatgagggccgcaatcctggcttctatgtggaggcaaaccctatgccgactttcaagtgtgtagtaaaagccctgtttgactacaaggcccagagagaggatgagctgacctttaccaagagtgccatcatacagaatgtggaaaagcaagatggtggctggtggcgaggggactatggtgggaagaagcagctgtggttcccctcaaactatgtggaagagatgatcaacccagtcatcctatagccagagagggagcacctggatgagaacagcccactgggggacttgctacggggggtcttagatgtgccagcctgtcagattgccattcgtcctgagggcaagaacaaccggctcttcgtcttctccatcagcttggcatcggtggctcactggtccctagatgttgccgccgactcacaagaggaactgcatgactgggtgaaaaagatcccggaagtggcccagactgcagatgc

SEQ ID NO: 2284 - DNA, 553 bp, Cricetulus griseus
gaagaagatccgaagcctcatgaagactcaccagctggacaaggtgttcgtggccacagacgccatcaggaaggagcaggaagaactgaggaagctgctaccagaaatggtgaggtttgagcccacgtgggaggagctggagctgtataaagacggaggcatcgccatcatcgatcaatggatctgtgcgcatgccaggttttttattggcacctcagtttccacattctcttttcggattcatgaagagagagagatcttggggttggaccccaagacaacatacaaccggttttgtggagaccaggagaaagcatgtgagcagcccacacactggaagattgcatactgagggccaccgctccaccacccaccagtcactcggtcacagggtcccagaggaggcagcacacctaaagcccgaattcctttttgttcatggctgacatcacaaatgtgtcttctgtcaggacttgagaacccatgtccccatcacacatgtgacatgtgtgccagttcagaagtgtgaggaatatttgtcagtcctgacagg

SEQ ID NO: 2285 - DNA, 308 bp, Cricetulus griseus
agctgaaaccatggatagagaagacagtgaagagagtgctgggtttctcagagcccacagtggtcacagcggcattgaactgtgtgggtatagggcttggataagaagaaggcggctgatcacctgaaaccttttcttgatgattctactctccgatttgtggataagctgtttgaggctgtggaggaaggtcgaagctctagacattccaagtctagcagtgacagaagcagaaaacgagaactaaaggaggtgttcggtgatgactctgaaatctcaaaggaatcatcaggggtaaagaagcggcg

SEQ ID NO: 2286 - DNA, 303 bp, Cricetulus griseus
gccgccatggctgacaaggaagctgcctttgacgacgcggtggaagagcgtgtgatcaatgaggaatacaaaatatggaagaagaataccccttttctttatgatttggtgatgacccatgccctggagtggcccagtttaactgcccagtggcttccaaatgtaaccaggcctgaaggaaaagacttcagcattcaccggcttgtcctgggaacacatacgtcagatgaacaaaaccacctggtgatagccagtgtccagcttccgaacgatgatgctcagtttgacgcatctcactatgac

SEQ ID NO: 2287 - DNA, 220 bp, Cricetulus griseus
cgggaagccgcgggttgagcggcaccgtggtgctggagctgcgctgcttgctgcccgagggcgcctcggagctgcggcttgactcacacagctgcctggaggtgacggcggcgactctgcggcgggggcagcccgaataccatcagccactctcggagaccgcgccgtttcacacgcatcccttctcgcactatggccaggccttgtgcgtggtcttccc

SEQ ID NO: 2288 - DNA, 422 bp, Cricetulus griseus
tgcttgtcaccatgtttctgtacaacttgaccttacaacgggccactggcatcagctttgccatccatggcaacttctctgttcctggagggtcagatggtccaagtggagtgctgatctgtgctgaaaattatattacctataagaactttggtgaccagccagatatccgatgtccaattcccaggagacggaatgacctggatgaccctgaaagaggaatgatttttgtttgctctgccacccataagaccaagtccatgttcttctttttggctcaaacggagcagggagatatctttaagatcactttagagacagatgaagatatggtaactgaaatccgcctgaagtactttgatactgtacctgttgctgctgcaatgagtgtgcttaaaacaggcttcctttttgtggcatca

SEQ ID NO: 2289 - DNA, 422 bp, Cricetulus griseus
tcagtggccttgtggctgccaaggtgatcccgtcacctttcaagtatgcggacattgtcaccaccaccactcacaagactcttcgaggagccaggtcaggactcatcttttatcggaagggagtgcggaccatagaccccaagactggccaagagatcccttacacatttgaggaccgaatcaactttgctgtgttcccatccttacaggggggcccccacaaccatgccattgctgcagtagctgtggccctcaagcaggcctgcacccccatgttccgggagtatgccctacaggtgctgaagaatgctcaggccatggctgatgccctgctaaagagaggctactcactggtgtctggtggcactgacacccacctggtgctggtggacctgcgacccaagggcctggatggagcccga

SEQ ID NO: 2290 - DNA, 552 bp, Cricetulus griseus
tcgcgggtgttgctcttcggccttcattctgtctgtagaaccctgatttctcatccccgttcccaatgttcccggaactcaataaccttctcggcaccaccccagacgggacggagcaggggaaactgactctactctgtgatgccaagacagatggcagctttcttgtgcatcacttcctctccttctacctcaaagctaattgtaaagtctgctttgtggcacttgtccagtccttcagccattataatattgtggcacagaagctgggtgtcagcctgacggcagcacgggagcaagggcagctcgtgttcctggagggtctcaagtcctcagtggacatcttcttccatgctcaggaggagcctcaccccctgcagttcctcatggaggccagtgcagggaacctacagtcgctgtatcagtttgttcgggactccctgaagcccgtggacagtggggaaaccccgtggaagttcccagtgctgttggtggacaacctcagtgtgctgctgagcctgggcctggaggcagttgctgtgctggacttca

SEQ ID NO: 2291 - DNA, 569 bp, Cricetulus griseus
gatccaggtatctccgtttttacagcagatgttcatgcccctgcttcatgccatttttgaagtactgctgcgaccagcagaagacaatgaccagtcggctgccttggagaagcaaatgctaaggaggagttactttgccttcctgcaaacggtcacgggcagtgggatgagcgaagtgattgcaaatcagggtgcagagaatgtagaacgggtgctagttactgttatccaaggagctgttgagtatccggatccaattgcacagaaaacatgttttatcatcctctcaaagctggtagagctctggggaggcgaagatggaccggcgggattcgctgacttcatttacaagcacattgtccctgcgtgtttcctagcgcctctaaagcagacctttgacctggccgatgcacagacagagctggcactttctgaatgtgctgcgactctgaagacaatccatcttaaacggggccctgagtgtgttcagtatcttcaacataagttcctgccctccttacaggttgctccagaaatatattatgattcctgttaatcactttcagcag

SEQ ID NO: 2292 - DNA, 1323 bp, Cricetulus griseus
gcagaagaccgcagcccaggtgaccttactggctgagcaaggtgaccggctccacgggctagagatggagcgccgccgactccacaaccagttgcaggaacttaagggcaatatccgggtattctgccgggtgcgccctgttcttgcaggggaacctactccatcgcctggctttctcctgtttccccatggccctgctggaccctctgaccccccaacccgccttagcctttcacggtctgatgatcggcgttcgaccctgaccagggcgcctgcacccactacgcgccacgatttctcctttgaccgggtgttcccaccaggaagcaaacaggaggaagtgtttgaggagatttccatgctggtccagtcggcactggacggctaccctgtgtgcatctttgcctacggacagaccggcagtggcaagaccttcactatggagggcaggcctgggggagacccccagttggaggggctgatccctcggcgcatgcggcatctcttctctgtggctcaggagatgagtggccagggctggacctacagttttgtggcaagttacgtagagatctacaatgagaccgtccgagacctgctggccactgggacccggaaggggcaaggcgagtgtgagattcgtcgagcaagaccaggcagtgaggagcttactgtcaccaatgcacgctatgttcctgtttcctgtgagagagaggtggaggctctgctccatttggcccaccagaatcgagctgtggcccgcactgcccagaatgagagatcatctcgaagtcacagtgtgttccagctgcagatttctggagagcatgctgctcggggcctgcagtgtgtcgctccccttaaccttgtggacctggctgggagtgagcggctagaccctggtttaaccttaggccctggggaacgtgatcgccttcgggaaacacagtccattaatagcagtctgtctaccctgggactggtcataatggccctgagcaataaggagtcccacgtgccttaccgaaacagcaagcttacctacctgctgcagaactcgctgggtggcagtgccaagatgctcatgtttgtgaacatttcccctctggaagagaatgtctctgagtctctcaattcactacgttttgcttccaaggtgaaccagtgtgttatcggtactgctcaggctaataagaagtgaagatggccagagcctggttccgctgccgctgggttgattgtgtctctctctgtgtgtactgggggggagaggggggtgagagatacgcttttattgggtggacatcatttgtacccaactat
